United States Patent Application Publication US 2026/0258423 A1 - sequence listing, part 75

SEQ ID NO: 301568 - DNA, 83257441 bp, Homo sapiens (residues 76,853,053-78,987,859 of 83,257,441)
  source 1..83257441: mol_type = genomic DNA
attcgtcccacgacacgtgggaattgtgggagttacaattcaagatgaaatctgggtgggacacagccaaaccatatgaatccccaagagaaaccccgtaccctttagtggttatcctccattccccctgcccctaggccctggaaccatgaatctgctttcaggttctatggctttgcctatctggacatttcatgtagatggaatctgcaatatttgcccttttgtgtttgacttctttcaccccgcgtaatgttttcaagattcattcacattgtagcacatattagtatttcattcctttaaaaatttaaatgtggcaaaatacacgtaagataaaattaccatcttaatttttttttttttttttttttttaagatgtggtcttgctctgtcacccaggctggagtgcagtggtgccatcatggctcactgcagcctcaaactcctgggctcaagccatcctcccacctccacctcccgagtagctgggacaacagccaccatgcctggctaatttttaaaaattttttgtagagatggggtctccctctgctgtccaggctgatctcctgcctgagcctcccaaagtgctgggattataggcatgagccaccgtgcccagccatcttaatcttttttttttttttttaagttgcagttttgctcttgtctcccaggctggggtgcaatgaagtggtcttggctcactgcaacccccgcctccctggtgcaagcgattctcctgcctcagcctcctgggtagctgggattataggcttgtgccaccatgcccggctaatttttgcatttttagtagagatggggttttaccatgttggtcaggctggtctcaaacttctgaccttagggtatccacccacctcagcctcccaaagtgctgggattacaggtgtgagccactgtggctggcctcatcttaatcatttttgtgtgtacagtttagtagtgttaagtactaaatattactatgtgatcatcaccaccatccatcttcataactctttcatctcgtaaaaccgggctgggcaccgtgactcatgcttgtaatgccagcattttgggaagctgaagtgggaggatcacttgagtccaggagttggagagcagcctgggcaatataaagagacccctctaaaaatttttttaaaaacattagctgagcatgatggtgcatgcctgtagccccagctacttgagaggctaaggaaggaggatagcttgagcccagaagttcaaggctacagtgagctgtgatcatgccatttgcactccaacctgggcaacagagagagagagagagagaccctgtctcaaaacaaaacaaaatgaaaaaaccccacaaaactctatacccaacaaaccactctgcattctctcctccctctagcccttgggaaccctcgttctactttctttctccctgagtttgactattttggaacctcatataagtggaatcccatagtatttgtctttttgtgcatgacttatttcactcagcataatgtcttcaaggtttgaaggtttgtctatgttgcagcatgtgtcagaaattcccttttttttttttgaggcagagacatggtctcgctctgtcgcccaggcttgagtgcagtggcacaatatggactcaactgcaacctccgcctccctggttcaagcaattctcctgtctcagcctcctgtgtagctgggactacaggtgcactccagcacacctggctaatttttgtatttttagtacagacagggtttcaccatattggtcaggctggtctcgaactactgacctcaggtgatctgcctgccttggcctcctaaagtgctaaagtgctggaattacaggcatgagccaccgcacccagacataaattccttccttttttttttttttttgagatggagtctcactctgttgcccaggctggaatgcagtggtgtgatcttggcttattgcaacctctaccttctgggttcaagcaattctcctgcctcagcctcccgagtagctgggattacaggcgtgtgccaccatgcccagctaattttttgtatttttagtagagacagggtttcaccatgttagccaggatgttcttgatctcctgaccttgggatccacctgccttggtctcccaaagtgttgggattacaggcgtgagccaccatgcccggccaaattccttcctttttaaggctgaataatattccactgtagggacataccacagtttgtttatttcttcatttgctgatggacacttgggttgtttccccctttggctgttgtgagtaacgctgtatgaacatgggtgaagagatacctctttgagactctagttgcaactcttttgggtttatacctagaagtagaattgctgaatcatatggtaattctattttagtttttttgagaataattcctttttaaggctgaataatatttcatcacatggataaatcacgttttgtttattcatgcatccattgatgaaaaacttgaattacttccactttttggttaagagttgtgatgctggcccggcgcggtggctcatgcctgtaatcccagcactttgggaggctgaggcgggcggatcacctgaggtcaggacttcaagaccacctgaccaacatggagaaaccccgtttctactagaaatacaaaattagccgggcatggtggcacatgcctgtaatcccagctacttgggaggctgaggcaggagaatcacttgaacccgggaggcagaggttgcagtgagcagagatcatgccattgcactccagcctgggcaaaagagcaaaactccatctaaaaaaaaagaaaaaaagagagagtcatgctgctatgaacatgcatgtacaagctcctatgtggatatgtgttttcatttctcttggagatgcacttagccgtgaagttacttcattttttgggcctcagtgtttgcctataagacaggatcaggctctcacatggttatttgtatgaactgatgagatgtttgcctggtacaaggtgggtgttaaagaaatggaagctaatgataaaatgattttgtttctctgtgcctgaatctcgtcctcaggagcttataatttagtagacacataagccacaaacagaagccagctctgtgtcaggccccatgagaagtccgcaggtgcgatcttcaatttggaggtgaggaaactgaggcttggagggtgatttgccaaggtctggatcgggaaggggaggcaggactcaaggcccattgggctccggggtctcacagtgagcgaggaagctgagaagagcctggcccatcttgcaggcaccgctgtgcttccagggttgcccaggcgagaccctcaccccatgtgctacctgtccctgacaggcagggaaaggggctgggccggccctgggggtggctgtgtggatgaacacctagtggatgatgaaatgcaggctgagaagagtctgagatgaatcgggaagtttcgggaagctgcccctacggtgatgttcagtgtcagggagctgcacagaggagccggtggaggaacatggagagtaggaggcggtgtgaggcagacactctttgcctggcatgggctggaggtgtggggtgaatggttcacgagaagagggggcatgcacagtgcagtgggcacagagggcaaggtggaaggaaacagccttggctgaccaccatgtcgggctgggcttagggactggggtcctttgaatccccaccgtcccctgcctcgtccccacactcattcatccattcagtgaaaacccctctgtcaaatgcggctcatgtcacatgcggctcatgttagatgctgtttgggacacttgggaggcctcagtgggcaatagattaaattcctcctcctagcttgagggggtgcatgtgtccatccccaccttctcctcaaatctctcagaggacaaagcaggggccacggctctcccacggcatcctctatacagccatggaggctggagcagagatggaccaacaaaggggtccatctgccacaccccccatctacttcccttctgttgaagatgggaaggtcatggctgtctcagtgtggcaagctcccacctggaactggacaccataaaatcttgctagacagggacggatttcaaggtggtcttgggaggcacctccgccacggcctgagatcctgcagcaccctcgcccggatcacaaccagagcaggaggtgtctttgggccaccgctcttttgagacgatccgggggcgttcagggagcaggaggaggaaaccgaggcagctgggtggagaagcacctctgtgcctggtggcctgctgtgtcagcccctcctcatgtggcacctgcatctctgggagggagcccttttcctggggcctgaacttcccagggccatgcctgctcatgcctgcccctgggactcctggcccagggttttgagtccagcaagggacagaaggtaagttcgtgggctctgaggtctactgggcctgagtttgcatttggatcagtggtgagcccttggacaagatgtttcaccgctccgagcctcagtttccctcatctgttaatggggatatgagctcacacatggggagcactgggcgtcacagtgcctggacacagcagctctaacaggattgcatgtgtcagtttcctatgcctgctgtcaccacacacttcacagcttaaaacaacacggatttatcatcttacagttctggaggttggaggtccaaaatggtcccttgaaggtgtaaatcaaaaataaaattctggctgggcgcggtggctcacacctgtaatctcagcactttgggaggccgaggtgggcggatcacgaggtcaggagatcgagaccattgtggcaaacacggtgaaaccctgtctctactaaaaatagaaaaaattagccaggcgtggtagcggcgctacttgggagctgaggcaggcgaatggcatgaacccaggaggcggagcttgcagtgagctgagatcgcaccactgcactccagcctgggcgacacagcgagactccatctcaaaaaaacaaaaacaaaaacaaaaattaataaaataaaattcgaagatccccccaaccatctgaatggactccctcctcttggccagggcactcctcattatgacctcctcccttttggaattcaggaaaagctgactaacattgaacatcaacacagacttcatctgataagaaacattcatgatctactctctatgaagcctgctacctggaggtatcatctgcatgataaaactctggtctctacaacttcttaccataacccagacactcctttctacggataataactctttcaaccaattgccaatcagaaacattttatttcttaatttattattttactattattatttttttctgagagggagtctcgctctgttgtctaggctggagtgcaatggcgtgatctcggctcattgcaccctccacctcctgggttcaagcgattctcctcccttggcctcctgagtaaccgggattacaggcatgcaccaccacacctagctaattttttgtatttttagtagggatggggtttcaccatattggccaggttggtctcgaactcctgacttcaggtgatcctcccacctcggcctcccaaagtgctgggattacaggcatgagccaccatgctgggccgagaaacaatttaaatctacctatatcctggaagccctcccctcccactgcttcaagtcatcccgccttgtgaactgatccaatgtatattttaagtgtatctgattgatgtctcatgtctccctaaaatgtataaaaccacgctgtgccctgacctccttgggcacatgtcgtcaggacttcctgaggctgtgtgatgagcacattcttaaccttggcaaaatgaactttctaaatggattgagacctgtcttggatccttctgggctcgcagaggctaaagtcaatgtgttggccgggctgcgttccttccagaggctctaggggagaacctacctcctttccttttccagcttttggaggctgcctggatcccccggcttgtggcctcttcctccgccttcaaagccagcgaaatggctggtggagtctttctggtgctgtctcactctgacactcttgttttgtctccctcttctatatataaggatccttgtgtaggagtgacagaaccttctctctctctcctggaggttcagtattcgagcctgaaaaatgcactcagcaggagacagatgagcaggaggaaagacacacatttatgaggtgcatgtgcacaggggtcacacagggtaggcgcctccaagaaggaccggatggttgaagcttaaatagcattttgagctacagaaagaattaggggcttacaggctcctggagggtggtggcgaccagcaatggagggtgagggcaggagctgcactgggaacaaaggcattagtctctcctctggttagtgtgggttccggggccaagacaattgcattccttctggaggaacttcccttagataagggaagcttcaggaaagcccctccctgtgctttgggaaagaaaggatggagacacaggatggagactggagaagggcagagagaccttcgttctgaggctgctgcttcagttcaaaatacagccctctgcatcggtgcattccacatctgcagattcaaccaattgctaatggaaaacattaaaaaacaatcataacaatacaacatttacaaataatactggctaggcatggcagctcatgcctgtaatcccagcactttgggaggctgaggcgagtggatcagtcgaggtcaggagtttgagatcagcctggccaacatggtgaaacctcgtctctactaaaaatacaaaaattagccaggcctggtggtgcctggctgtaatcccagctacttgggaagctgaggcaggagaatctcttgaactcgggaggcagaggttgcagtgagctgggcgacagagcgagactcggtctccaaaaaaaaaacacacatttaaaaattaactatttacatagcatttatgttgtgttaggtattataagtaatctagcgatgctgtaaggtatatgggaggatatgtacagataacatgcaaatatgatataaggaaattaagcatccttagattttggtacctgcaggggtgctggaaccaatcctgcatggatactgagggatgactgtacttagcatgtcaaagcgccatattttgaggtgtcattttctgacttccagcacttgaggttacattaggcctgtaacagtgaagaagcaaagaacaaacatcactccctccatttgtgtttaagaggcctttactcattcctgcacgtctgctaggataattttagagcactgagacaaaatgcaaaacagcaatcatgtagtttttgaaactctgggattaaaggcgaagtctgtaaacaactagctatgttttattgacagtttacaggcacactgtgaccggaccaaggacaaataagttctcaacctcttctgaccctcactgatgttcagatgtctgtggtccttcatcacctctagatcccaatgccctcctcttccccatatccccttgccacaaaaaccctctggctagcctaaaaaattggagttgttacttttgaacactagttcaccatcttcctggttttgctggcttcctgaataaacctgcttttcctctgtccaaccttactgctcatgtctggcttttgggtggcaagcagctgaacctgggttcggttgaaggcccacccagataatctaggataacctctgcatttttttttttttttttgagacagagttttgctcttgcccaggctggagtgcaatggcatgatctcggctcactgccacctccgcctcctgggttcaactgattctcctgcctcagtctcctgagtagctgggattacaggtatgcgccaccatgcctggctaatttttgtatttttagtagagatggggtttctccatgttggtcaggctggtctcgaactcctgacctcaggtgatccgcccacctaagcctcccaaagtgttgggatgacaggcgtgagccaccactcctgacctaatctctgcattttaaactcagttggttagcaacctaattctcacaggttctgaggattaagaggtggacatctttggggactgattctgctgatcccatatttctgcagtgatctgtgatctaaccagagaaactgttcagaaagaaagggggtctgtattcgtcctttctcacgttgctataaagaaacactggagactgagtaatttataaagaaaagaggtttaattggctcactattccacagactacaggaaggatggctggggaggcctcaggaaacttacagtcacagcggaaggcaaagaggaagcaggcagcggcttcgtggcaggagcaggaggaaggcggtggggaggtgctacatacttttaaacaactggatcttgtgagaactcactatcacgagaacagcaagggggaattctgcgccctgatccagtcacctcccaccaggctcctcctccaacagtggggattacaattcgacatgagatttgagtggggacacagatccaaaccatatcagtgtcattaaaaaaatagttgccctgctaacttttttaatcccctgtaactctaaataaaataatgatgtgaacataacacatttagagtccctggttcatttcctggctgtattagtctgttttcacactggtataaagatactacctgagactgggtaattcaggaaggaaagaagtttaattgattcacagttccatgtggctggggaggcctcaggaaacttacaattagggcggaaggggaagcagccatcttcttcacaaggtggcaggagagagaagaatgaggaatgagggggaagagcctcttataaaaccatcacatctcatgagaacgcactcgctatctcgaaaacagcatgagggaaatcacctccatgatccaatcacctcccacggggttcctccctcaacacggtgaggattatggggattacaattccagatgagatttgggtagggacagagagtcaaaccgtatcactggcatatagtagatgctcaataagtggaatctcctgatcatgataaagtgttcgcctgtgtttccagcactgggatggggcctatgtggaggaggagggctgcctgtctggttggtgcctgcttggctggccacacacaccccagacacagtggttacctttcctgcagaacagggcaagtacaatagctctgctcgcagctcccacaagctgtgcggtagaatggccttctgtcataaataaaaataaatcctagacgctgcctttcaatcagaggattagtctaaatgttgtgaaacagaaagcataaaatatgcattggagaagcagctctccccacctcgtggcctctgcactcgaggtggctagtgtgtgagggccagttgtccccgcgcagtgccactgttgctgatttgtacgcggtgtcagtaaatgctgttatgacattattaatgctgcacactacggcaaaggacaatggcctattgcctcgtaatgtgctgtgtgctgctgcagtcggagcacattaaatggggatttcaaacatggtaaatggcttgtttctcttctccctctacacaccccaggccccgtctatgagctctaaaaacaaccttgaagccttcagaaggtaggagtggcagtcgagcctctgatgcccagtgaggctccagcgggaccagtgagggggtccaggggtccctaggaagcagcccagccttcccacccccagagtgcacctaggactgttgactttcctcgctggggcaggcaggtgtctgggcagcttggcctgaggcttgagggtggtggggtagttcagggaagctggacttgccaggtgggtgggctggtgggctcactgctctgccctccagtgacacgcgcagggggcccagatggtaggccttccggtggattttattggtcttgcacaatgttctaaaaatactgagcctacattttaaaattatgcgacttcacaggagaagcccagatttctggcttctcttgaaataactgggcccacagtcacacaatgcaatggtgacgtgtccccttcgggggctgcagcccttgacggtctttagccacactggtcatttgaactaggtccccgtagtgggttaaacagtttcttccccaatccatgtcttcccagaacctcagactctgaccttattgggaaatagagtctttgcagatttaactagttaagatgaggtcctgtaggattagggtgggccctaaatcaatgagtagtgtccttaccagaggagggattttcaggcacacagagatacgcccagagaaggccagatggagataaggcagagactagagtgaggtagctacaagccaagggctgcctggggctaccaggagctgggagaaaagcctggggtggtttatctctcagagcctggaagaaatggaccgtatcaacaccttgatttcagacttctggacttcaggaagctgaggcaggaggatcgcttgagcccaggagatcgaggccgcagtgagctatgagtgcaccaccgcactccagcctgtgtgacagtgcgatgccctttcttataaaataacaaatagataaacaaggactggcatcaggtgtccctgtttccaaaccccatcccttttcactgtttcttgaggctatcaacagacccacaaccagccaaatgcagagcaggaggcacattcgcccaggtgccctaaatatagcacttccagcccctccccttgagcagggtgaatgtgaagaaataaattccagttgccttaaaccacgcaggttgttgtggtttgttgcgattgcctgggaaacaccccactccccttcccttgttttctggcccaccctgtcagtattttgagtttggacctctgaatggcaggacttacctcactgcacccttcccgagtcctctgcctgtttggacacaggcctccactgcctggccagggaattctgctgactgtgggcttcttctgacccctccagccaggccagcaggacccaggggcagggggaggggctggaaatgcttttttttattattgttgttgttttttgagacggagtcttgcaccgttgcctgggctggagtgcagtggcacaatctcggctcactgcaacctctgcctcccaggttcaagcgattctcctgcctcagcctcctgagtagctgggattattgtattagtagagacggggtttcaccatgttggtcaggctagtctcgaactcctgacctcatgatctgcccacctcggcctcctaaagtgctgggattataggcgtgagccaccgcacctggctttttttttttttttttttttttttgagacggagtcttgcactgtggtccaggctagagtgcagtggtgtgatctcagctcactgcagcctccatctcccaggttcaagcgattctcctgcctcagtctcctgagtagctgggattacagtcacccgccaccagacccaactaattttttgtatttttagtagagacggggtttcactatgttagccaggctggtctcgaatgcctgaccttgtgatccactcgccttggcctcccaaagtggtgagattacaggcatgagccaccgcgccctgccaggaactgctatatttagggcacccgggtgaatgtgcatcctgctctgcatttggctggttgtgggtctgttgatagcttcaggagagaaacagtgaagagggatggggtttggaaatgggtacacctgatgtcagtccttatttatttattattttataagagacagggcgtcgcactgtcacacaggctggagtgcggtggtgcgctcatagcttactgcggcctcgatctcctgggctcaagtgatcctcctgcctcagcttcctgcgtagctgggactacaggtgcatgacaccacacctggataagttttaaagtttttggtagagatggggtctcactatgttgctcaggctggttgtctcaagctcttggcttaggcattccttctgccttagactcccaaagtgctgggattacgggcgtgagtcacggcgcctggcccaccgtcagtccttggccgggccctgcagcaggtgccgccgttcctactcccctgttctctggcttgcttccagagactttcctttctcctcaggaggccacaagtatttgtctagaacagtgcttccccaccttgcctgtgtcggcataacctgtggcatcaatgcaccagcgtgcccaggctgcacctcaggtactggatcagaataaggacaattttgctaaattctgcaggtgattctgctggaatctgggctgagaaccaccagtcgatgaggcaggatcttgggatcttggtgtgggtcccccagaaacagatgctcagaataggattctgcaagtggtttatttggatggtgaccccaggaacattgaccggggagtggaatgagacaggagggaagggagtgaacacaggggcatcacagggctggctacaccacgggtgactggagctcaaacttgctgggaacctggggagccacggggtaacacgccgcggagtatcccccttaggaagagggagtgggggtgtctatccactgcttgagggctgctgccagggtgttgatcctttgtccagggtcctttcttcttgcccttttgtgttctagcatattcccacagccattaaaaaaaagtcctcaggcagagagttgaaggtgttctcagtcatctgcctcttagcttgcagaggtgactgcagtgggaaccaggactgggcacaaacagcatctgttcctgacggacagtaacaaccatcagaaccaccatgcttgaaaggctcaggaggtcctggcaacgggctacttacctgcattaagcggctcaatcctcagaacagctctatgaagcaggttataaggagccccacttatagttgaggaaactgaggcatgaagaggttatacccaagactgcatgatgtgggattcacagtttttctcctaatgcctacagcacagtggagagcaagcaggactgtttacactgaactttactgcagacaagaggccaaaaaaaggggacagacttcaaaagggacaggcagctggacaatctggcttgcaaaatgccactggctggcccagcatagtggctcatgcctgtaataccagcactttgggaggccgaggcaagcggatcacttgaggtcaggagtttgagagcagcctggccaacatggcgaaacctgtctctactaaaaatacaaaaattttgcatttttataggcatttattacaggtatcgtggcacgtgcctgtaatcccagctactcaagaggctgaggcagaagaatctcttgaacccaaaaggcggagtttgcagtgagccgagattgcgccactgtactccagcctgggaaacagagcgagactccatctcaaaaaaaaaaaaaaaaaaaaaaaaaagtcactggctgtcctctgcttgcttccctccctggcccaagccagccgtcaaatggcagagaggctttcccgctccaacttcaaagtccagatctaagggtgtgtggcccaggggaagaggggagtaccttcccctaccttctaaattctggcttctgtggagggtaggccacctccccagatgacccacaccagaggtggccatgccttctagggaaccccatctccaccactgaggaagaggcttcccctttggcctaaaatggcaaccagatataaatgccaccccctaagcctactcaatcagaagaacccccaatcagaagagagacacctaatcagaaggaccatttcattccttagtgtagatatggcttattgccaggatttgtggcagatgtaggcacccaggcatgagatgtgatttacaggcctggcagagacctctgccctccaacatctccttagccagcctgccacgatgcccaaatttccggccaccattcatcactcttctgcacaaaggcacggtcagcatgtccttgttcaatgcaaatttgttacctagcctgtgtaacacattatatctgctaacaccaatttatcacccattttcacattagcagagagcaaggcagtgagataatggaactcagcaccggtaaattttgatgaagaaggagcagcaaagcagagagcgtgagtcatggccagtgagtaatggcccaggaagggggccgggaggtgggcagggcaggcagcaaggggcctgggtatgggggattggaggggaccaggcccagctggaggaaaataaagtctcctcctcgcataagccaggctgcagcatcgtggcctgagctgggaagaccctcagagtcatttgacacatgactgaggctttgggcacttcccagggtggggtggtcagatatgacctcgggaagtgcttttgaagccggagagctttcttcaggctggctctgcgagctcccaggagtctctgtctctgcaactgcaaacacatctccagagccaggaagtacgaggagggggaggggaggacgcctagatgctaagagacgacatgagatcctacatgctttagggttgcaagggaccttggtgagcttctggtcactatcatttcataatggagactctgagacgtgcacacttgatcgcccactggctagtggaggatctggggctacaactcagtacgcccctgcgcctggctctgtgagcgggccccagcaccacaggccgagtttatactcagatcagtaagcaaagaggagccacgggagtttctgaccagggaggggcagaagataggcatgtgttgccaagcgaaatcgtgggaagcggctgatgaggaagcccacggaggcacctggcagaagagaagggtctccgctgggtgcgcatctcttctgtgctctgcgggagccaaagcagctttcggccctcggggctggtggcgccctgggaagctgcttggctcaggggaaggagcagggacccccgcccgcccgtcctcgaagctggtcctcggcgtcccagccccgcacggccccgggcagggcgcacagcggggctgcggccacgaggtggcgccggcgcgccttggaagcgcagctgcagctcccgggccgccccagcgccgctcggccgcctcctccgaggaacaatgcggcgcctccgggcgtagcgtcgcgcggggccggacgccggacaccagagcgcgggcggcggagccagcgggcgagagagcgcgcggcgggcgcgggttgccctcgtcgagagccatgggcgcggcgcggcgcggggctgaggatcggcgcggcccggaggcgctggggaccggggcgcgggcccggggccgcctttagccggcaccgagggcgcggggccggggatgagggcgcccgccgcggggagcccgtctgcgcgccgcggcaccttcccgcccagcgagcgagcccgagcaggcagacgcgcggccggcggtctgggggcgcgccgcctcccggtccccaaaatgtgaagcggggagggcggagacgcagagacggcccggccgggcgccctcgccgccctccggcagccgcgccgctccctccgctgcacgcccaggcctgagcagcgaggccaccgggccgcgcgctcccagcttcgctcggacgcggcttcggcccgcagagggttcgtggcccggacgcggcgagagctgggcccaggacggtgcgtccggcctcgcccgcggctgctcgcaccaacaagtttgaacaatgatcaccgtcaaccccgatgggaagataatggtcagaagatgcctggtcaccctgagaccctttcggtaaagttccctcctggttggttttttccccaggggggcgccgggtggaggtgggcgaggtcggttcctgcgaacgttcaagtcctggtggcagagggggcggttcacacttcaacccctggtgatgaccagtggggctgggctgggggaacggatggcgttggggttcggggtgcggatggggagggttgtgttattcggggacctgtcccgagttgggcagggttggagaggactcggggtgcagaggtaagaatgggggcagaaaacccccaggtcgtggtcctgggcccagaaagttgccccagcctgcgcgccccttcccagcccctcagggtccttcctcaccccgcggacggtcccatccgggtggcaaagttagtgtgcggcgccttggagctccccctccggtccctcccgtcccgcccgtctgcccctaggtcggctaccccccaacccctccgcctgtgccaccctctccccagcctttggtggcactgctctcctccccgcggggctcgggcctggctccgacgagagggtcccgagattagagcgaggactcgctcatcccaggattcgcccccgatcgcaggcgtcggagaggcgggggcaggggcggcgctgcagggctacggggcggctggagccgaggctgcggcggagcgtggtgggcgggcggtggcgaaggcgacacgcttcgggcggccaacacctgggggcccaggccaggcagggctggggccgcgcgggactcactggacccagccaggggcccccagggcccagcggtgccggggcagccccctctcctcccaggcatccgcggaaccggcccgcagcggggtggggagggggcgctgcccagtggacgcccggcggggcccgagtgtcaccccgtgggtagctgggcagcgaggaagctgggggagtgaccgccccggcgcgggggccggactcgggacgtggccacaggtgggctccgggcgcgggaaggagcccgagaaggcggagcttgcaggggccctgaactcttgccctccaggtctcggcccagccccactgtggtccccctgccggctccagacggggatgggggcggggagacggtggctcacctggagcccgcctcccagcacaccgggcctgtctgctgggccgaggaggcaaccccaggggacggcaggggtcaggctggacctctgcggtccgggggtccgggaggcccggagagctggtgcaggccgtgggtggtgatgggggcgtcgggagcccatgggaagcagggcgggaagcaggcgtctctggaaagggccttgctcctccagggaaggccttgaatccctggcctgactgggaacgctggagggtcctcgccccttccgaccccatccctgtcccgccctccgggccgctgggtgtttcctggcgcgattggaagcagccgcgagaccccagcaccacggacagtgctcgcgacccagggctgcttccctgtctggtcctgccctggttttctttcaggcccttatctgaaggcaggattgggggtggaggtgcatgggtccccaaagttgtgtaacttcaccccagggtctccctgggctgcccggagacccgcagccatcagtgagtcccttcagttgaggtggggggcaggctgcaatcatagcaccccagcttattcatcctcaaaggcaggctggggtcctgttccctgtggttttcccagggctgctggcagggtctttattccataggtgcccctggaatgttgcttgagtggatacatggatggctgaagccattttaacttgaatccactccaaatggcccccagctgccttgggggacattgaaccccaggatggggttctggcagagggagatgcagatgaggtgtgttagggggcttcaggttctgggctgaagggggtagacacctttctcatagcagggttgttggatcctggcaggcagcccaggtccccagctctaaatacaactccttcactcccctggcctcttctccagggactagagacatgagtgggggaagtccgtccttgtcctcagactgggaggacaaatagctgatttcccctgggatctccctgagcatgggacagcacctctcctgtgccatggccgtggctgttgtctccagagccacctgacttcctctgagggaccccaagatctgagccccacccccaggcttggtggaattccgtgaggcgtccctctgcgctaaggaaagtgtcccttgcgcggtcttgcctactgaatcatgtctcctgtccttcctgctgggggtgtggtcttcgagtctctccttggagctcccaagcccctctctgctttggggttctcctcttctctgcccaaatctctaacagcttcctttaaatatgggctgggaattttgttgtgctttttatttccttctgcaattatatgttttctttaatggaccaaattttaattaaatactgctctgccagtttcaaataatgaagattaaaatgcataaagcaagtcttgcataaagacacaaacaagcatggaacttgagggcggggagtggaggggcaaggcccggaggtctctggcatgacgtggggctctctccagggagcctgactccacacaagatggggttcctcaccctgatctggggttggtgggagggcgcccctctcagctctaccagttcatcaagtcctctgataggttcaagttcccagaagagccccaaggctgtgctggtgagctcagcttgcctgtttggggcctaggattgatgagggaagcagcaggaccctgggtctggacttgaggaaggaagggttctgtgccttgttccctgctgtccccctggggttaccccagagcctggctcctgctggataatcaataactacatgttgaaggcaggaacaggagtcctgttctgaccagccctccctcccacccagtgtgacagcacacacacctatatgacaccccttgcacaggtatgaggacaccctggccagtccgtggtgcaggctgatgaccctgggcgtgcctgcctaggggagatgtgtgttggggggagcctgggcatgggccgtgtggctctgccctggacatcttaccatctagtggtggaagtggaggggggtgttcaaacaagctcatgactgctgcagcaaggcctctgcacactgcaccaaggctggcctgagtgattgatggggtctggctggcctcaggccctgctgtgtccatcactggttctcaaactttagcatgcagtggaatcttcaggagactttgctaaaacagcttgcttgctccaccccagagtatctgattcagtaatttggggtctgggcccggcattggcatttctaaggagtctcaggtgatgctgactgctcgtctggggactgcactttcaggactgcagctgttaatgaaccagctctgcctggaggctagagcccgcctgcctcatgcctaagtgtgcgtcattctgccttgtggtttctcgtgtggctcgaggccagcatcttgtagttgagctctctttatcctatagtgggggggccctcctgggtctggagctcagcccccatcctttcattctcccttgcttccttcactcatgcactcattcgtaaaacatttgtgcagccggtacgtggtggagcgtcagggcacgatggcccttcctgccctcctgacccgcctccttcctctccgcaggctttttgtcctgggcatcggcttcttcactctctgcttcctgatgacgtctctgggaggccagttctcggcccggcgcctgggggactcgccattcaccatccgcacagaaggtaccttggtggggcaaggggagtgtgagatgagtgagggcgtttgtgggtcaaagaggaagtgcctctgagcctagccctgtacctggctttctggccgccctgtaggtggatgtgagtggagggggcctgggcttgggccgtatgaccctccatgcactttggctctggtctggctgtggtcatcaggtttcctctggcctggattctcaggccaggctagggcctttaagccagggtcttccaggcctcagaagaggctgccagtgttgcttctttagttgggtgtcaggggtgagaggtctctggatatgacacttgtctccttgaggcacacatttccttgcctttggcccaggctgtggccatgtgggaacgggcctggccatgggcttaaatgtcttatctctgagctcttgggacacagctccctcccaggccccatcactccttgcccacacgatatttgcaaggcagtggaatggagatcagagcatgggctttgggcgtctggtgggtctgggcttgcatccttgtcatcacctaccagctgtgtgcctttggctgagtcacctggcttccctacagagaaggacagcagtgaccttctgcagaggttggattgaaggggctcacacgtggacattacccagcatggttggtgccacatggcacaagagtgaccagctgggagccctcctcctgaagctgggcccagccccacctcatctcacctaaggaggggtgggggtcagaactgagccctgctcactgtatcatgggggttcttttggtcactggtcaaaaggagggacatggggtagtggggaaactgaggcaagtaggtttctggaactgttcgagggttggctctgtgagattcccctgcccctctggggaagtctctccttgaagtccaccttcttgaacttgcagggcttggctttctggctcccctgttctgagtgatgaatattgtagacatcccaagttaaataggttgtcatctgggtgggtgctgaggggctcttattatgccatctgtcatctcatcattagattcattcctctggtttcacatgcacttctttaaacttgcaaaagccctcagaaggaatctcacgcttattagtcattcaagcctgagtgtaagttaatttatcccgtctctgacttgcagagattcctcaatctctgagcctccaaattttcctctggtaaatggggatggtaatacccacttcccaggctcgttgcgaggctgtgcaaagataaagcaagggaaggggcctcagcagcatctgtcaaacggcgagcactccatcaatacttaatggatgtgtcgagtctgaaatgggggcactgcagcaaagcgtgtttatgaaagaggaccaaggaggtgctggagtgtctgtgtgggagaggctgaggattgaggtgggtggggatgggagggagcagtcgtgaaggtgaaccggaagggtggcttggggaagggctggtgggaaaagtggtgcatgggaagatggggtgtagacagagattcataaactacctggctgccacccctggaaaggaggtgtgcctatctgggtgggctgctacagaggccttgaggaagttgaacctccagaaaggtcaggggtctaagaggtgggaattagggatgggggagaggaggggtttttggccgggctctggtttttatgcctatctccctaagggggttagagagtcaaggtaactcacctaccccatggctcttgccccatctgggcaggatcagactcagtgccccagagtgcaaggggtgtaggagccctgctgtgctcggtgctatgcagttttgcctgggtatgggggtgggggtccaaccccagctgcaggtctgggtctaaagatggatggaaccacataggagagcacttgcccaaggtcatacaattggactagaggtgtgtgtgcattcgtgtgtacatgtgcatgtgtgtgcatgtgtgtgtgcgtgtacgtggtcttaaactttttaatggggtatcatatacacaaatgaacaatccatgcaactaacaacccagagcaaggaccagaacgtgatcagtccccaagtgtccccatgccacttcacagtcattactcacccaaggatagtcacgacttgacttctgatcacatagaagagttctgcctgttttttggactttgtgagcatggaatcgtttcaggagttgatatggtttggctgtatccccacccaaatctcatcttgaatcgtagttcccataatctccacctcttgtgggatagaccctgtgggaggtaattgattcatgggggtggtttaccttggtgctgttcttgtgatggtcagtgagttcccacaagatctgatggttttataaggggctttttcccttttgctcggtacttccccttcctgctgccatgtgaagaaggacatgtttgcttccccttccaccatgattgtaagtttcctgaggcctccccagccatgctggactctgagtcaattcaacctttttcatctataaattacccagtctcaggtatgtctttagtagcaacgttgagaatgaactaatagaggagtagtcttttgtgtgtgtcttttctctcagtagtacatgtgtgagactcactatcttgtatgcggttgtagtcacttgcactttttttttttttttttttttttttgctgtgtagccttccattgtgtgagtacaccaccatatttttatccatccgaccattggtgggcatttggtcgtttccagttttgggcttttgcgaacagtgctgctatgaatatttcagtgcacgtcttttggtaaacatacgtaggcatttctgttgggtatacctaggagtggagattctacgtgttgtaacattagttctcagaccaagtttatccaagccagtcttttcacatttcccaggcctcagaagctgagtgcctggaatacagaactgaagtccgggagaaggaggagacagacaagaaaagggccgctgagaacccaggagagctgaccctgattcactttagatcccgactcgcattgtcctccatgatttctttcatacccttggatcaagctaatctgcttgggcagacccaaggcagggactcaggccgggaaagcagtgtgcaatgtgggtttaacatcctgatcctgcaagagaagcccctcaaactacatccccacgcagtgcctggggcagccctgcagaaaacctaggaggtaccagcatttccacttaggagatgcctgagggaaggattagggcttcacggggaggtgcttggcaaattgcttggctgaatcaggcctggggagggatcttggaagtcctgggccaaggttggattgttggataatgcacgttttgttacccaaaagaaatctgcggagtctagacaaccccagagcagaatcaggagaaggaaaccctctaaggccctgctatttagaaaaaaaaaaaaaaaattgcattggtcaacaaaacaatctgtgtacaaatgggaaaaacaatctctcctcccctgtcaaaccggtgacagaagtggggtcccacatggactgtggctgcgaagggagagggaggagaaggcttttctcgaaaagaagaggagggcgtcattcagcctcttgtggactgtggtctatgtgtggggcctccaaattctcctctgtgcctgtttatacttcatgataaactgcgtactttggggatgaaatgtgactgacatctcattctgtattctgcacactcatcttaaagattcaagagaggaggctgcatggggaatcatgacccggaggagatctgacttctttccctcttgctgcatttgggctgggcctgggctctggggagggctttccggcattgccccctcccaggcagctctgccccacttcccaccccaggtcctcctcctgtttcctgcccttccagcccttctcgcctaggcctccttccccatgtggctgcagatagtgctgtgaggctgtttcctgccctctgacttgtcttgaagaagcagtggtaggaggctgggtgtggtggctcacgcctgtaatcccaacactttgggaggctgaggcaggtggatcacctgaggtcaggagttcgagaccagcctggccagcgtggtgaaaccccatctctactaaaaatacaaaaattagcagggtgtggtggcacgtgctgtcatctcagctcctcgggaggctgaggcaggagaattgcttgaaccagggaggaggaggttgcagtgaactgagattgcgccactgcactccagcctgggtgacagagcaagactctgtctcggcttaaaaaaaaaaaaaaaaaaaaaagtagtggtaggaggctatcttttgggaggggtctgtaggctgaaggtccatggcacagctgcatgtgtctactgggccctgccagacctcccaggcctccaccagggattgaacctggggaaggctacctggctctgtggatggctctggctctggctctggcccttggtactaaggggccctggggctcttctctcaggcttgatggatgggggaccggggcccggaggtctgaggaagagcctggtgtggcctcccacggcctgtccttgtcttctctgctgcccggagcccagagctcccgtggcctcagctggtttctgcggtgagcgagtacagagagataaatgtgcgcatttctccagctgcacgaacacccagtcacagttcccttctcagtgccagggaggtctctgctttctggagagatgggggctcattcaatttccaatggtaaagggtggggatggggacaagaaaagggggacgaaggaggatgagagagacagagagagacgaagagcgtctggggaggagacggggcctcggtgggtaataaacacatcccgtctgtaaatgagaggatctatttgtatctcccagcgtcccagctttccttatttatatggaaatatggagggaacgtgtgcctgttctgagttgtatcactggggcctcacattagatatatttcaatttagctgatgccaagagtggtgaagtgactctggggaagcgatgtcagcttgctctgctgacagtcccggggccagtggtggcttttaggggagtgggtcactgggggagagtcggcctgacctgcttccctcctgggtacccaccccctgcctagtctttgggcatttccagagcacaaaatgtgcctggtaccccgagggctcattgggaaggggtaggggctgtctccccaggtctcaggggtttctggagttccatgccatctgcagaagatgggagcagctcctgagcccctggcacggggggacttggtccagtctgatggggtggggcttgaagaactacagaaggggcatctggttccgcaggcatggtcatcgtgaaacccaggctgcaatgacccatgcctctgtatgtcctcagggtttttgtttgtttgtttgagagagggtctcgctctgttgcccaggctggagtgcagtggtgcaatcgtggctcactgcagcctcaatctcatgggctccagcaatcctcccacctcagccctgaaagtagctgggattacaggcacatgccaccatgcccagctaatttttgtattttttattgaaaaggggttttgccatgttgcccaggctggtcttgaactcccgagctcaaccaatccatccaccttggcctccccaagtgctgagattatgggcatgagccactgcacctggcctgctgccagtttttataggagcgtttctttcttttcccatttctctaatctccggaggcaattaggggaagacacagaaacagaagtcagggcgatagagactcagagctcaatgagcccagccccctcattttacatgagggtaaattgaggccaagagaaggacggtgacctgctcacctgtctggtccgcagcagagcgggcctggagtccaggcttctgccccatcccccttgactgggcccatgccaccatgctgctgctgcagcctccactttgttgactttcaggggcctctgcagctctaggccagccctcatagtttttggcccatcatctgtttttcagcctgctcaatgggactgggagcgtggggtgtgggtagggagctgtgaccgtgaggtttctgggagggggctcaggcgataggcaggggcagaggaagcttggggtgggcttggagagtgggaccagtagtgcagcaggcagggtgccaggcctaaggcgctccagggaacacagcgtcaccccaaaagccacgctgtgggctcagcaccactggggtgctgcgtctgcaggaacgagctgctgaccaggctctgtggtcagtcaggcctgagtgctctggccacggcaccgctatggtgtcccagctgtgagacaccttatgggatgaaacattccttttttcatctcagtcctttggggaagggactactccagcccgagctatgagcgacagcccaccagggctgcccagtgaggccacgcaggctgtgcgctgcacgactccacgacagacaccctttaggcggccacaataccagtggtgtcctgtggagttgtagaaagcagtggccaggcaggtcatctgatgtcctccagtttttttagctgaaatgatggaaatctcttcatctactctgtgctacaagcactggttgcaagctcggtattgaatttggatgatgggcttgggcagacatctctgaaacgagagtgatctgaaaaagtaaaccgttgcccccgcctctgggaagctgaaagagagagggagctatctatatcctgttttctcccactcctttggagaaggactactccagcccaagttatgagcgatggctcaccagggctgcccagattaaccgattgagtgtgtgagtgcgtggggagggcctgagaggctggagagacctgagttagtgtcatctaacgctagtatgaaatttcccggtcccagctgagtttttgaaaatccactctgttttccgtagagggacttgtggggaggtcctttgctgcttcagctcttggggtggggaggaaatatgcccattttctccaatacccgaccccctccgtgagccttcctgggcatctctgcctctctctcctccttttcttctgcccgccacatcccccctgctcccattcatgcctgttcttcagagccaggagccctgtgtctttaaggaaatcgcagcttctcctgttttgcagccctagcctggccggcatttccaaggtgtgtgagtggtcccgccccagctcctgtggcctcccttctgacctcaggcgggttcacctggcaggggagcccagccagggggtgacttatatcagggtgggaacgtggcagcagtggctgggccagccagagccagggaagaagggcagaaccaaagcagaggtgtgagagcagccccggtgatgcagaagccgctggctgcccctgctccgcccactgcctctagctccctctctcctttccctgttctgcctcttctcagtggcctctctcgtcaccttcctggtcctgtggtctgcagacggggcctgttattcttgccttgagacggggatgctgaagctcagagccattcaatgactgccctggtcacacaggggtcagcgggcagaggccccagtccccttgcccctccccaggtggggagactgcagtgtgttctacatggtctcagggctccccagcagggctaaggttgggcgcccgggtggtaatattctcggcagtgcagctttccacagcttccccgtctctcttcctcactctcctgctggggtttccattagctcccggttaaactactcaccctcaaacccttgtcccaggctctgcttctggggagcccaacccacggcatcctccattgggcccctggactggcagcctgggagcatcgaaggttcatgttcccaggtgacttggctcgttttgggggagtgatttcaagcctgatccataggggtttgggaggagctgagttgcggattttagtgcctggagcccagcaccctatggactgtgtggaggggcaatgtgaagccttcagatttaattaaaaaggaaggcgagaactcgctcccgcacactggcacgtgcagcgctaatgatcgggaatgattagaaaggaagccgtggaggactgcaggctggctgatgggatcttggtcgaagtgcctcattttcatgtaattttcttcttcataaggtctcccctccccaggctgggagcagagggaagagcagccgcctcagccccagggaacctgcccttgtcagttgatctttggaaatccaaagaccagcttgagattcagaacacatgcattatggtttccaacaggagggtccagggaagagggatggggaagagatggagttagggcccagaggccgggcaggagaaggagggctggggaagcaacagggccctggggccctgaacacaggctcccaacttccctgcatgtccggatccatggggagcaaggaaagtgcagattcccgggccccgggtcctagagagttgaatgggcaaatctagaccaaggcccagaaatctgaattttaacagcctggccagaagattcagatgctgctgggtgattggccacacttctaggaaccctgatctagaagtcctgcctggagcttaccgtttgggggctctggggcttctttcccagtgctgggccttttctgccatctcacggacatgagggttgttgggccccagagcacctcaaaggttacatctaaagttcctttttatggttgacaaaattgaggcccagagggcttaggaaatgatcccaatgtcacatggctagtgggcaacggggctgcccagggctctgcactccgccacgatgctgttctctgcaccgcaaagcaatgcagcaaaagggtcagcagtgcctgggaagatggagctgaggctggggtctggtgttggttggtgctgggggactttggggccagctttgtctgagctgccccagctcggacaccaggtggcctccaggctgctcgggcctcccctaaccatacccacactctgcccacagtgatggggggccccgagtcccgcggcgtcctgcgcaagatgagcgacctgctggagctgatggtgaagcgcatggacgcactggccaggctggagaacagcagtgagctgcaccgggccggcggcgacctgcactttcccgcagacaggtgaggggacgtggggaggaggcacacggagcaggggagcggtggcacctgccactccatccggggtgctgtccgtcatctccttttgtgaatctggagaagatttggaccacactgtggtacagcccagagtgcatttctaccacccaaatttaacaaccgttaacatttggtcacatttgtggcctgttttcctctttaaataaaacgtcacagatgaaaactaaaaggccttttaatgacttctccctagagacaagtgcctccctgaatttgctgtaagtttttccagtccattccgagcacatttgcacatatgtttaacacacacacattataaattcatagtgtgtgattttaacaaattccatgtaagtggcatctcacagcacatattccactgcccctttttttttttttttttttttttgacacagagcctggttgactctgtcacccaggctggagtgcagtggcacagtctcagctcactgcaacctctgtctcctgggttcaagcgatcctcccaccccagcctcctgagtagctgggactacaggcgcccaccaccacacctcggtaatttttgtgtttttagaagagacagggttttactatgttggccaggctagtctcaaactgctgacctcatgatccacccgtttggccttccaaagtgctgggattacatctttgccttttaaattaaaaaaaaaatttttttttgagacactcttactctgggctggagtgaagtggcacgatcttggctcactgcaacctctgcctcccaggttcaagtgattctcgtgcctcagcctcctgagtagctgggattataggagagcaccaccacgccagttaatttttctgttctttttagtagagatggggtttcaccatgttggccaggctggtctcgaactcctgacctcaggtgatccaaccgtctcagccacccaaagtgctgggattacaggcatgagccaccccgccttttttaaaaaaatcttttcatgatgattttgaactctgtgttgaggggcatgtgtggatactatgtacccctggccatttttgccaagtagaactttctggtttatttcttctaaatattctcctgcttcggccaggatgtctgagagcccagagtctgtgctgctatcctacaagccccagggacacatgaggtgtgacatccaaatcatgtgtcctaggtatataaggcatctcctggacctcagagaacaggagtgcgggaggtcaggctgtcccaactggcccctagaggtggatgtggaaggaggggctttgaccccaccctattccagggagacgagctccactttccctcttttatatattggggttctttgtgaaattgatttgctaaatgtattctagctgctaaaaattaagcttgaaacgcacttttagacaatttgcagaaaagctatttctcagccagcgtgtgtgatggaaaagccaaagctctaggcatttctaaagtacggagttgggtgaaacagaagaaaatgatgacccacaggaggtcactgtgcccgtgggagggttggagggatgcctgcctgagtcaggcctgaaacacagtgcgcccatgtggactggtgtgggatccgttgccatgtagcctgctggtgctgggctgctggccatggggccaacctctaactggccttgccgattgagtgaacgtcctggatgcctggtaggccagcctggtgtgagcatcattaccctcatattagctgacatttactcaaaacacactaagcacctggcatggttcttactgcataagcttaagataggtaagataagatagatcttacctacctcacaaccatcttatggtttaatctttaaagatttaattaaatctttactctcccagaggaggaagctttaatctcccagaggaagaaactgaggcacagagaagttcagaaactcacccaaagttgcacagctgtaagaggctggacttggctttgggttcaggctaactggctccacagcccacatttctaagcactgtgctcttgatgattgattcaatatgtggttatatgtggtttggtttttgtccctttctaagaggttttatttatttatttatttatttttttgagatggaggcttgctctgttgcccaggctggagaccagcagtggcacggtctcgggtcactgcaacctccgcctcctgggttcgagcaattcttctgcctcagcctcctgagtagctgggattacaggtgtgtgtgccaccatgcccagctaatttttttttttttttttttgagacaaagtctcgcactgttgcccaggctggagtgcagtggcatgatctcggctcactgcaagctctgcctcccgggttcaagcgattctcctgcctcagtctcctgagtagctgggattacaggcacatgccaccacacccagctaatttttgtatctttagtagagacggggtttcaccatgttggccaggatggtcttgatctcttgacctcgtgatccacctgcctcggcttcccaaagtgctgggattataggtgtgagccactgcgcccggcctaagttttgtatttttagtagagactgggttttgccctgttgcctaggttggtctcgaactcctgacctcaggtgatccgcccatctcggcctcccaaagtgctgggattataggtgtgagccactgtgcctgggctactggatttattttttaaaaagatcattctgactgctgtgtgaaaactggataaacagggtggcaggaggggaagcagtgaggccgtggtggagatggggagtgcctgcaaagggatctgagcttccttggaaatccccctgaggcatgaggccgttttcctctctgtgtgcatggatccttcttctctgacactgtctgtgtgccctcggatccagcccctgccccccagctccatctttctccctcagatccagtcctttgcccctctttcattcttttctgctttcctgtctgcctccagcggtgcctctgatgcagcctctgtccgcaggcctgttccccaggtcaggagcaggcctttttggtctctgttgaggatattgctgcaggcagcagagctgaaggtccagtggacccctggactccaggtctgccttcttgggctgggggtggtactgctggcgcatccagtgtttctctgatttttttccggtcctggcctgtgcctccctcccctgccctgccctttgtctcctcctggggaaggagggaacttgtagggggagggggaatatgcgccacctcccagctccctcctgggaaatagcaaccatccatcacgaccggcagagcccatcacacccacaggcagagccatcaatttcagggacactgtggttgctggtttcagggagagaaatggtgggtgtgtcccgggcctgtgaaagccgcctgctcacacgctcccgtgcacaaacactgctgccccctccgcaccctgaacctgactccaggttaaccaacctgcagctagaccggcaagaatcctgcaggagtgcctgctgctgcatttccagaaaactctcaggtgcctgcacttggattccccacttagaaatttcctgtggcttaaaaaaaacacgtcccctgttcttcctcagcccttttggaagcttctgggctgccgccttccactcatggctggtgtttcctcagggaaagtaaatttgcaattttagcctaggaaaacataattagagaggcagatttgcttcaaatggcatcgtattatgtatcctcaagccaaatagtaatgatctttgaattttccataaggccataaaaccaccgaaatttgaggctgtctggattgaagaggtcagtccgtatttgttgaatgcctagtgtgtgcagagtctgggctggaggtttgagagcaggtggaggggacacaaaaaagatggaattccactgcatgcccggtgcccagcctggccagtggcccctcagagtggggcagacctgggcggccttgggctctgcgagcctcaggttcttcacgtgtgtgttagagatgatgctgatgggaggcctgggccctgtgcttggcgctcagaagaatagtttgtctcctttcctttccttgtaccgtgagggtccagagaagggggtgacccaaccactctttgggaggcttagaatcaccaagtccccatggcacaggggagtttgggatagccttgaaggagagacattttgactggggagacagccagcactctggacagcgggaaggagcagatggctgaggtggctgagcccgagggaggtggaccagggaggaggggccacctgggagcactgtggccggaggacctggtgagtgaggggcagtggtgggcttgaaccctgaactttgatggctctaaagaccaccttcaggctgggtgtggtggctcacagctgtaatcccagcactttgagaggccgaggtggtcggatcacttgaggtcaggagttcgagaccagcctggccaacatgatgaaaccccgtctctactaaaagtacaaaaattagccaggcgtggtggcacatgcctgtagtctcagctacttgggaggctaaggcaggagaatcgcttgaagctgagaggcggaggctgcactgagctgagatcgcaccattgcactccagcctgggtgacagagtgagagtctgtctcacaaaacaaaaacaaaaaaacaccgttgtcctctagactccccagtttatgtcttaagctggcgctgtagccctggatgctgctgctctcagaataggcacctgctgacccacctgggtgtcctgggaacactcagacgtggggtctcctggttgcactcaggatccccttctctcccagcccccatctcaggctgtatcagtgccattattgccatggctcggaccccaaccttgcagtcacccctggctcttctctctcatacacttgccccatccctcagcaaattctcccaccttcagaatacgccttagaagcccacctcttctcaccccactgactgaccccaaccagctattccaactcagcagccgctagggtctttctttccctccctccctcccttccttcctccctccctccctcccttcctccctccctccctccctcccttcctctctccctccctccctccctccctccctcccttccttccttcctttcttttttcttttcttttttttttttttaacagaatcttgctctgtcacccaggctggagtgcagtggtatgatctagactcactgcaccctccgcctccagggttcaagcaattctcccgcctcagcctcccaagtacctgggattacaggcgtgcaccaccatgcccggctaattttttttgtatttttagtagagatggggtttcgccatattgcccaggctggtctcgaactcctgacctcatgtgatctgcccgccttggcctcccaaagtgctgggattgcaggtgttagccaccgtgtctggcccagtggggtctttctaagtcatcaataagtgtccaggtccctcctctactccccgctccctcatggccccccagctcactcgagtaagagcccaggtccttccattggccccaccatgcctggccccatgtccctctggctcctcctgctggttctgccactgtccctggagcacagtgatctcagaatttgcttccccgggcaggtggtaatgacaccacacacagcccaaccccagctctgctccttttaacagggggagtgcatgtgtgcacgggtgtatttatgtatttatttttttgtttggaagagaggagtcctctctgctctcacttggggagggggcctccccagcatcagggtggggagctctggatgggccaaggaggagctgaagcagaagagagcagtgcgaatgcaagccaggctggatgctggggtgggggctccatgtcccgtgtggtgtgtgtgaaagagacagaggcggacgcagagacatggcgacagagaggatccgtctcccctgctccggcgctcatgtttccagccgtgtgcactcaggtctcccggtatgcgtgtctgtaggcacctgtgtacgtgagtctctgtgttttaaaagaaaagtgatcagtttcataacaaaataacagccccagcaagcaccctagccagcggcggggagatcaatatccccgttaattgaatgcaactctcgtaaatcaggagagggagtcagaattaaatctctttcctgaggtggcctggagagctcgttctcaggggaagcagactggaccagaatcagtgattacctcgtggggcagggaggaaggggctgagcctcaggggcctctttgagggaccagcctgaagggagttgaggattggggcctgcgaggaagtagtgacctgccactggccacctgcggaaccagagttccccactggagggccgcgttggtggtatagtggtgagcatagctgccttccagagttccccgctggccccggcccatcaccctaggcctcaggtggtggagggaacagagcatctgggtccggcctgtggcctgcagtgttggctactctttggtcccttgggacagtgcccggaggctggctgcacgagggtcggccttgggaagaggggtgggcggtgatcagaggcctcgcttggcattcttttactttccgagtgagaaacgatggttttggtagaatgcctggggcttagtatatgtgcagaaaatatactcaggcccaggtctcccatgccaggtacaccgagctgttttgcagatgcagtgagaagatgcagggctggcgcaggggcagtgtcagccctgggagctcgccgtgtgaccttgggaaagccactatatctgccagacatcctgggaccttgggacccaggcaggctcttgaggtcacagtgcccatgggaggtgactgagcccacgggaggtcactgtgatgggtttgggcccaccaaggggtggctccagcaggcagggagggaagagctctcagggaacacacctgataacctgggaagtcactgtcccctctccccatccctgcccagagctgtctgcaaagccctctggtctcagaagctgtctcgggccaccgtgggtaccttcactgggagagaggcgtgtggttggcaggtcaggggcctctttcagccagtgccaccccagggcagccgtcggcccccaggggcatgttctggattccaacagactttgctgcagagctggctgaagtaataattattaatcatcataataattaatgatgataataatcaatgacaatagcaaataataataacagccaccctctattgggcaccaagctcactagagcttggtgaggaggatcccatccaggtctgatccaggcctgcactgttgtcacagccccacggtgccgagagccggaccaaccacatgacagccacgtttattggggatggggtgtgaaaaagtcccaagttcccagtgcagtccctgccgggctgggagggaggtgggacccttcaggctgcaagtatgtcctgttggccctgagggcttcctgatcatgacgaatgtccccagcttttctgttgaaggcagggcgggaccagagaccttcactcccctactgttggccatgccgtgggtggtctcctggcctggcttgggaataacctgtcactacaggatcatgtgccatggcctgggccagactcactgccaccaagaacccaggccccacagagtcctgggtctgaagagggacagtgagtggtggatctcagggtcaccccctcagaaggggctgcagtcctgtcctcggtccctctgagccattgaaacctcgggtggagcaatttcggggtcgggagactcactgctttctgatgtggtccattctgctgttgggcaggtctaactgggacttcatccagaagggggtgagacctcactttgactgaatgtccattacgagtagtgataataataaaatcattaaaactaggtatgtgtgctaggtacatctaagtataggtatacctgtaactacctataggtctcttaggagttcaggctgcaatagcaaagttccatagcctcgggggctcatagacaacagacatttctttctttctttttttgagacagggtctccctctgttgcccagactggagtgcagtggcacaatcacagctccctgcagcctctgcctctcaggctcaaacagtcctcctgccctagcctcctgagtagctcagcctgcaggtgcatgccaccatccctggctaatttttatatttttgtagagatagggtttcactatgttgcccaggctggtcttgaactcctgagctcaagcaattgggccacctcagcctcccagagtacttggattacaggtgtgagtcaccgtgcccggcctcaagcattcatttctcacagttttggaggctggaggtctgagaccagggtgccagcatggtcagctttgggggaggatcctcttttgggttatagatgatcagcttcttgctgtgtcttcacacagtgggaagaggctgagagagctctctgggggccttttttttttttttttttttggagactgattctcccaccgtcacccaggctggagtgcagtggcacaatctcggctcactgcaacctctgcctctcaggttcaagcaattctcctgcctcagcctcctgagtagctgggattacaggtgcacaccaccacacccagctaatttttgtatttttggtagagatggggtttcaccatgttggacaggctggtctcaaactcctgacctcagatgatccacctgccttggcctctcaaactgctgggattacaggtgtgcaccactgtgcccagtcaggggcctcttataagggcactaatgccattcatgagggctccaccctcatgacctaatcccccttcaaaggcctcacctcctaataccatcacattgagggttaggatttctttctttcttttttgtttctggagacggggtctccctctgtcaaccagtctggagtgtagtggtacaatctcggctcactacaacctccgccttctgggttcaagcgattctcctgcctgagcctcctgagtagctgggactacaggcatctgccaccacacccagctaatattttgtattttagtagagtcagggtttcaccatgttgcccagggtggtctcaaactcctgagctcaggcgatctgcccgcctcggcctcccagagtggtgggattacaggcgtgagccactgcgcccggccctgggggttaggatcgcaatatacaaattttgtggggacacagacatggttcatagcagcaggcaagacaagtgccttctattgcttactccttcacgcagccctccaagggttgcctcctttgacagacaagggagctgaggctcagagaggcttgtgggtctaggacatgcagcacggggccagcctggtggcttggtggctccaaagttctcggtgcttcgaacacagggttgttcctcttccaagccctccgtgaccctaacaggccttgaggagggcagggggcttcctggagtgtgtcccctgaccccactgaataagaaaaagccagcacagtgaggctggtatggtatcagggccaggaggtaggaagtctctttttgagacagggtctcactctgttgcccaacctggagtgcagtggctcgatcacggctcactgaagatctcaaccttctgggctcaagcaatcctcccacctcagcctccagagtagctgggaccacaggcatgtgccaccacacctggctaatttctgtatttttaggggagatggggtttcaccatgttggccaggctggtctcgaacacctgacctcaggtgatccgcccgccccggcctcccaaagtgttgggattacgggcgtgagccaccacgctcggccaggtaggaagtctttagaaggaagctccaggactgtgctgggccagtgacctctgccccgcaatgaagccccaagtgccaggcaagaaggaaactggcagagcctgtgtggagaggagaaggcgacctcaggctggtcctggggctccagatgcagggcactggcacagaacatttgggatccccaaggccaccctgaggtccagtgatttgctaggaggactcagaactcagcacagccatgatcctcacagtgacagcttattcctgtgaaaggatatggatgaaaatcagccaaggggagcggcgcacgggcggggcagagccctggagacccgcatggagcactggtgttcctctcccagtgaagctgtgacagcgcctgctctcccagcaacgatatgggacaacacacatgcgtgttgccagccttggtgcccagtgatgttatgggggctcagtctcagagacatgactgaccactcaggggctgacctcagtctctggcccttccagagatcaagctgaggtggcatgtcccaccgtcaatcacagggaagcacagactcctgggggtggcccaaggccccaggtagaaaaggacactcttatcaggggacactccaagggctgaggggtgagctcccgggagcaggtccagggcaggcctttctttctaatgtgtgggtgtggacatcccggagctgcccagctcacctgttactgcacgcacagtacgggctcttggtacctgtgtgttcttccctgtggcccttgagtggctcagtgataccctttgatgtaccccagggtcagcccacacagacacaccccaggttgctctctcctctgccccctctccctgataacccccctcagggtgtccttgaggctgggcctgcgtttggttcatctgcgtttggttcctctgtgcccagagcccagcaccgagcaggcacatggtaaatacgtgtgtatgcacgtggatgatggggcctcctctggggacaaccctcctgagccctccagcctcccctctccctgactctcatgggccagatcttcactgttcatgttcacgctgctctgccagaagcagccggttcaagctcacctgggttcacagccttcctctcttaaaatgcatgtaacaaagacataaaagaaaagaaaggaaaatgtactataagcaggaccaaagggctcaggggcatctgcaccagctggagaaagactgggtgcacttggtggtgggagtgaggcccaggggattgtcccctgtcccccgtgccggggtagattgaattcaaggtttgtaccctggtaatggattcttcagggttagggtggttgttgcctgggaaactccttctgccagagcagtttcggccttgcctcctgcggggagtgttggctgttatcccagtggaaatagccctgaaagtcccatcccccaggatgtcactttctagactgggggcggggggtgccagccttttgctcggtcttggccttggtcctgatgtcctgcccccaccctgtgcatggaccccttccaggtgaaatggtgcattcctgcctgtctcagagcccacctgttggcaccaccttcccggggtgtaagaggtggaaaatggattttcttccagcaacccagcgtgtctcagggcagctttttctgattgattgaagccagtgttccacttgtggctccagcctgcttcctttgctgaggaccaaggcctggaggcccctcgtaagcttgtgggcactgcacttgtgtccaggcattcattagggccacccggctccctgttcccccgccaggaacatcctctccagctgtccgtctccagccatgttgcctgttcagcagccttctgggctgggcggggtgaactttggggctaggctgcctggttggactgatctctcatttaataactgtgtgatcctgagcaagtcactcagccttgctgtgcctttgtttccttcctgatctgtccaatgggagcattaagagggaccaggatgttgccatggacattaaatgagatcagagtatagaaagagcttggcaagcgagtgctcaatgcctgttggctgtgtaactgtcattatcgttagtggcatggttttctcgtgtcctcctaaaagtctaggaaaagtcctgcctccctgggtggctttatgatgtcaggtaccttcctccatagaaaagattttaggctgtgcgcagtggctcatgcctgtaatcccagcactttgggaggccgaggcaggtggatcacaagatcaggagttcaagaccaggctggccaagatggtgaaacttccatctctactaaaaatacaaaaattagctgggcgttgtggtgcacctgtaaatcccagctactcaggaggctgaggcaaagaattcattgaacccaggaggtggagattacagtgagctgagattgcaccagtgcactccagcctgggtgacggagtgagactctgtctcaaaaaaaaaaaagaaaaaaagaaaaaaaaaggcaaaaaaaaagaacagattttaaatggcattgatttcctagggcagcacaaactgattgtgttaaaccagctgtccccaaccccctggcatggaccggtaccgctccatggtctgttaggaacctggctgcacagcaggaagtgggcggcaggcaagcaagtgaggcttcgtccgtatttacggctgctcctcatcgctcgcgttaccacttgagctccgcctcctgtcagatcagcagcagcattagattcttataggcgtgaaaaccctattgtgaactgcacatgtgagggatcaaggttgccttcttctgatgaaaatctaatgcctgatgatctgtcactgtctcccatcacccccaaatgggaccatctagttgcaggaaaatgagttgcagggctcccactgattctacgtggtggtgagttgtataattatttcataataatgaaataaaatgtacagtcaatgtaatatacttgaatcatcctgaaaccatccccactgcccctctccctgggtccatggaaaaattgtcttccacgaaaccagtcctgggtgctaaaaaggttgggaaccactggattaaacaacagaaattgatcgtttcacagttctggaggccagaagtctgagatcaagacgtcagcaggcagtgctagggaaggatctgttccaggccctgctcctggccttgactgatgggagcacaatttgagtcttcacatggtgtcctctctgtttgtgagtttcagaccaaatttccccttttgataaaaacaccagtcatattggatgagagacccacttcactccagtatgacctcatataatcactcatgacatctgcagtgaccctgttttcaagtaaagtcacatgcttagctattgggggatagggctgcaacatacgaatttgaagggggggcatcatttaacccatggcaaaaattatattttataatatatgaaaatcacattaaaacattttctttgatctacaaggggtttttttgtcccccgatttttaaagaaattcaaacattttcgagggcccctaaaagcagcgtgggccctggcctgcacctcctggccctggtggagaagtcagcgctggtgctgcctaccccacggtgacaacaccaaggccctgggttccccacacggtgacaacaccaaggccctgtgttccccagaccacataggctgaaggccattggccaccatccccccagtccagcccctctttttcttttccaaccaagcatttcccaggtcatagatctgttgaggtttgaggctttacgacatctacttttgttgtcacttttagaaaaacctctcagggagagaagcctaattgtatatgatttgaaaatagaaagggctgtgcaaatggtaagtccagtataataatagtgatgccaaataattgtgttttgaacaagttgaacttgttaaatcagacagatgccatctgcactatttaaagcctgtgctggcgatgggttttacacagacatgcttgtcgcaggaaaattgctgaatcccccaaaaagtaaagtgctttgctttgtagtcgggcgtatgatgcttcctctcaggaatgggatgactgctgtccctggggagcaaaagcatatcaagcatgtattgagcacctcctgtatgctgagtactttgcatttggcctcacagcttatcctcaccaataactccattactcagatttcacaggagttaaagcctgtgttcagagaggttaggtaacttgcctaaggtcacacaaatgtgaagtgcagccaggatttgaacccaggacctctgacttccagggtttcactctttccaatacatctctggctaatgtggagagtcactgacccagcgcttgaaactcaaggacatcccttgatttctttctttcctgtgagagcggcaggagaattaaagcttggccttcagcaagagcaacgtggttgctgaaaagaacttcttgacagcaggagcatccaggagaacctagattttctctctctctcttttttttttaaacaaagtcttgttctgtcacccaggctggagtgcagcagtgtgatcatggctcactgcagcctggacctcacgggcgcaaacgatcctcctgcctcaatctgagtagctgggaccacaggcgcacaccaccatgcccagctaatttttaaaattatgtatagagatagggtatcactctgttgctcaggctggtctcgaactcctgggttcaagtgatcctcctgccttgccctcccgaagtactgggactacaggcgtgaacctctgggcctggtcctggactctcttttgcggtggattaaaaaccatttcccctcagttctgcggatggtgattatcttagtttcgtagagttgccgtaaaaaatgaccacaaaccagatgtcttaaaccaacagaaatttactctttcccagttctggagacagaagtctgaaattagggtgtcagcagggccgtgttccttccaaagctcgaggggagactcctccctgccccttcctggctgctcctggtggatgctggcagtgcctggccttcttcgtcccacagatgcatcactccgctctctgcctgcttcgtcacatggtcttttcccctgggtgtctgcatgtggccttcttagaaggaccccagtcattggacttagggtcagcctgatccaatatgacctcacctgaactaattacatctgcaaagaccctattcccaagtaaggccactttctttctttctttctttctttctttctttctttctttctttctttctttctttctttctttctttttcttttttttttttttttttggtttattaaaaaataagtttattggccgggcatggtggctcacgcctgttatcccagcactttgggaggccgaggtgggtggatcacgtgaggtcaggagtttgagaccagcctggccaacatggtgaaaccctgtctctactaaaaatacaaaaattagccaggcatggtggcacatgcctgtaatcccagctactcgggaggctgaggtaggagaatcacttgaacccaggaggcagaggctgcagtgagccgggattgtgtcattgcactccagcctgggcaacgagagtgaaactctgtctcaaaaaaaaaaagtttattgaggtatatttttcataaagtacactaatattaaagttagaacttgatggagttttgatggagttttacatatggacagattcgcctaccaagattaggttacataggatatttctagcacacaagatttcctgtgttccgtcagcggaagtcattcttagcccctaaacctaacttccaccctgacttctatcagcattacttttgcctgttcttgaacatcatataaatggagtcacagagtacataatctttttatttttttttttttttgagacagagtcttgctctgtcaccaggctggagtgcagtgacgcgatctcggctcactgcaacctctgcctcccgggttcaagcgattctcctgcctcagcctcctgagtagctgggattacaggcgcgcaccaccacacccggctaattttttttttttggccaggctggtctcaaactcctgacctcaggtgatccaccctccttggcctcccaaagtgctgggattacaggcgtgagccactgtgcccggcccataatcttttttatttggcttatcatgctcaacattctgactctgagattcgtctatgtcattgcacatagcagtagcttagtattttttttatgtccataggttattggggtacaggtggtatttggttacatgagtaagttctttagtggtgatctgtgagattttggtgcacacatcacccgagcagtatacactgcaccctatgtgtagtcttttatccctcacataaggccacattctgaagttccagctggatatgaattttggagacactcttcagcctaagtgatggagccccgagcacagggcccacgctggccagcatctggttccacacaggaaagccaagtccctgtcctggaggactcaggactccattcggggtttcaggctggccactcacaaccacacccaccgtgggtcagggggttcagaaagtgacctggctcttgcaagacggatggagaggagcctcgctccagggagaggtgcctccaggaagggctgaaacgggttgaggtccgttccaaagtctctagttgacctggcaggacccctggcttggcttgtcttgacataggttgtttgtgccctggggtctctggttagaaggtaggacaggcgcccagtttttctccattttgcgtgcctcctgtcatgatgggagccttagagcccggctcgtctccagctctgagcctgcagcagtggaggtttccctgcctctgcactctgtccttgaaatattcattccaggctgggtatggtggctcacacctgtaatcccagcactttcagagactgaggcgggaggatcacttgagcccaggagttggagaccagcctgggcaatatattttctacagaaaattaaaaaaaaattagccggacgtggtggctcatgcctattgtcccagctacttgggaaactgaagtgggatgatggcttgagcccgggaggttgagactgcagtgagccatgattgcgccactgcactccagcctctgtccagggtggcagagtgagagcccttctctctctccctctctctctctgtgtatataaaaaaatattcattcctgtcaaaggagtgtccatcttgcccctgtaggtcagcatggaaagcagctccacgggcttcatctggactgatgtcagagcctggcagacatcaaatcggcatgtttcttcttggagggaacccaggcattctcggtgggagcacatcactgccaaaagggagaacactggttcttgaaacaatcttagctgtaagaaacctcctagacgggcaataatgagaaaaggttgatgtgccctggtctaacccaagtccctgtggctgctgcttcaaccacatcaatatcagtgctgatcacgaatgcaaacagtgctgatgtcacacaggtgccgctggccacgcactttacagctctcttcattcagtcctcaccatggtagctgcccttatgtcttaaaagatgagactggtgagcacagagaggctcggtgacctgcccagggtcacatagctcataggggtctgagcttcctctcatctccttgtatcatactggtaatgaaccttgatgagttttggatagatgaaaaatactcctacttccttcttcctgaggactttttgagcaaatgaagcaggtagcttttacgtctcttctctttctttgtaatctcacagaaggctgtcgtgcattcaactttgtgctccaaaaagccatgtccaagtcctagccccaggacctgtgactatgacctcatttggatataagctctttgcagatgtaatcaaattaagaggaggtgctactggatttggatgggccctggttccatggctggtgttcttataaagagaggaaagtggacacagacacacacaggggagaaggccgtgtgaaggcggaggcagaggtcggggtggagcagccacgggctgaggaacactgagggctgctgctacctctggaagctgggagggaggcctgggggaggctcccctagagtctaaaggcgccggccctgctgccacctcgctgtctgatttccagcctccagagctgccagaggagaaatgggtgtggttttaagccacctggtttgtggaaattattgcagtcaccccaggaaactaacacaaaaatggtggcattttttattttaagagttttatgtttgtttgtttttgtcaaagtttgccttgggcactgaactagagtgagaggacagactggattgtgtgtgcatgtgtgcgtgtgtgtgcatgtgtgtgcatgtgtgtgtgtgcgtgtgtacatgtgtgcgtgcgtgtttgtgtgtgagtgtgtgcgtgtgcacgcctgtgtgcatgtgtgtgtgcatgtgtgtacatggggggcttgttccccattcctgtcatctgccttttgtcccctccacttcggtgtctgctttgctcccacctgtcaccctgactagtcccccgatgtgtatggggccactgccctttctttccttaggaaaggtggaggtgggagagtgtgatggctgtagagggcgggtggccattgagggttcctgctatgccttctctagtggacagctcactaggctcagaagaggaggagaggtggggtttgcagacccgaacggagcccaggttggaaaaatccttcatcgaattcccattatgtgcagccataaagaccagtaccttgtatagggataaacggagcttaaactgggcctgcaaagccacggggtgaggtgagaatcaaaggaaaccgaattaatgtgttaaaaaaaaaaaaaggcaagcagcttcctggagaaagacccccagggctatctttgtgtgagaagatctgccagctgaggggaatccatctcaatagaagtttgcaatgagataaatactgcatatgacggctaataaatgtccctgagagctgagtagtaatcaacacaggaaataaatcctccaaaaataaaagcaacactggtatcgatggtgaggtggagggctgtggtggtggcagtcacctcctttaagatcctgggaaggatttgttctcaggaagccagtgataatttaccggagttttaatacctggcaagttcccaggcttctgcgggtagaatttattttggcacaatatggcctcttgggaggaaatagagacagactcggagaggcccggctgtgcctaggaaaaggcctctgtcacctgtgtgacccctggacagaacctagccaggctcttgaatggaattcctctgcctgtttcagccccatgcactgcccttcagcacacatgcagtaatgcacggacatgcctgacacgtgcagatagggtcacatgtgcagatatgggcacacgtgccattgtgggcacacatgcagatgtgggcacatgtacagttgtggccacacatgcaaatatgattacatgtgcagttatgggtatgtgtgcagttgtgggcgcacatgcagttgtgggcacgtgtgcatatgtggggacatgtgcagatgtgggcacctgtacagttgtgggcacacgtgcagttgtggccacatgaagacatgttctctgactgctcagggaaggtggacatgaggcctggggccgaggggtgggggatgtccactaaagggctctctgcagatatgatcacacatgcagttgtgggcacaacatgcagttgtgaccaacatgtgcagatatgggctttcccgtatgtctgtaatgtgtgtactggatggggtgggctgccagctccatcttctcacccgattcactccccaccatttggtctgcttggggtcagggtttgggagcctggggcattgcagagcctgccgcctttgcctgtgggccttactggcaggaccctcatgggaaggtcaccccggccggttctgtggctcacctctggcttttcccacttaggatgccccctggggccggcctcatggagcggatccaggctattgcccagaacgtctccgacatcgctgtgaaggtggaccagatcctgcgccacagtctgctcctgcacagcaagggtgggtgccagggggcgggggtaccctctacccctagggggccaatgaactgggtgctgggtgggccctgggagggtgggacacttggggtgtggccgacttctcctgacagcagctctgctggctcttcggggccccagtttaggctttcagcaggacaactgggggttcactccctcgacccggcaggagggcgctgaggacagaggaggtccctggagtctcagcttctggggtccacagttccaggagtgaggccacctggggaagggtccctcggcggcccctccagtccctgtgatgtggggagcagcgagctgggggctgcaaacctcatttctgcctcctcagaaaacgctggggatgctttcgggtgggtgcatgaggtctgcccatccaggcagctgctgagtggctgttcgcaccagctcctcactgcatctgaaccccctgaggaggccgggggcaacctaggcccgggttgaccttgtgggtgggttgtgcggctgatgagctttaaggtgggaaagcctggcagcggattgtgtgggaagctgcctcccgcacgcaggcctccctccctgggctcctccttggaccagggacttcagcaaggtgacctctccctacagtgtcagaaggccggcgggaccagtgtgaggcacccagtgaccccaagttccctgactgctcagggaaggtggaggtgaggcctggggctgaggggtggggatgtctacagctagggcctctctgtctggccctggcccctcacccaggcacaagctggcagaggccaacctcagggaaacagcttctctgctcagtgcatccaccccacccatcaatccaaatcccccagaaagagtctccctcaggtgtcggtgctttctcacagcaaatgattaaatctccaagtgtcaccgccagcagccggattcccccagagactcagaggagtggccctggctgccctgtccctgctcctcctggcccagccaacagctggacggagagtcttcctgccccatttctggggccaccactggctgcatgaagtctgcccttgtaggagtcgtccacagccgtgaagtcagctccccactggttctgaacgccctaaggggtgggcggtggtgccgcagaccccttccttggtgaccatctgggatcactgcaggtggatcccgccctggctccagccctggccgccttggaggctgctccctgaccttggcctctagcccaatcctgctctggtagcagggagacggggaccagagggagagggagacagccaggcctcctggctctttgccccagacctttgagccagtgttctctcccagtctctcctctttccagacatgagggctggtggtcctgcccctgccatctctggggtccttcaggcgggtcctggttcaatctcttctctgccctgtcccctgttgcatcagtagggtgggccacatgggccccatccttgacctcaggacccctgggggtgcacgtgcgggggagtccccgagggtcagtggggctggcgcagccccctgcccagcctggccctctctgcagtggatgcgtgcccgctggacctctgacccctgctacgccttctttggggtggacggcaccgagtgctccttcctcatctacctcagtgaggtcgagtggttctgccccccgctgccctggaggaaccagacggctgcccagagggcacccaagcccctccccaaagtccaggtgggcctgggaggtgggtgggccggtgaggggctggtgtggctggacattcttaaggacagtggacagaaacctctgtcctgagggaatgagactgagctgcttgccaggtgtgtgggcaggtccgagcccaccctaccgggcagacgggaggccagcctgccaaggcctgtctgccttctttgagatgccaccaagctgggcctgtttgcagggcaggtggggggcctggagatgcccccttagtggactagaatagtagtaatagcagctgtcacttattgagggttttctgtgtccagatgctttatttgcacttaaagttcccagccatccttgtatgatcgtatttgacagacgatgcatctgaggtttacaattgaattaatgggttcgaggcgcatagttgctgtggtggccacgtctgtcccctgccatcggagtcctggctatgaccaccaccctcactgcctccctgtcatggctgggaacctggaaactgctatggttggccacctccgtggaagggctaggggcccatggttagagctgggctggggagggtgtgttgacagggcgggcagggctccctggttttgggggctaatgagccccttagaaagtgcaggagaagctggagcaggccccagcctcatgggagggtgccagcccctgtccccaggccagcggggaatgatggtggccgcaggttgaggggcagagagctgaggtctggacccctccaggcagttttccgaagcaacctgtcccaccttctggacctgatgggcagcgggaaggagtccctgatcttcatgaagaagcggaccaagaggctcacagcccagtgggcgctggctgcccagcgcctggcacagaagctgggggccacccagagggaccagaagcaggtgcgtggcccctgccccctcatgtgcaggagctgagaaagctcagggcccccacttctgagtgggcatggaataggtcttcaaacaagctgtagtgggcttctgaatttgatcagagggagagaggggtagggatggcagagtcgggatagatgtctgtggtggtggcccctggcccttttcaaggttgggaccaaatgacaagcccccaagaggtcctgcattctgtgtacatctggttcatgtcaggcagaaaagtcatggtattggcctggaaagttgggaatgttctggggagcttcgttagctcatgcctccattcttccttccctccttccttccctccctccctccctccacccagtagatatttacgtggctctcacattgcccttttatttctttcagagcccttatcatttcatgaaattatctcttgtctgtgttcactgttgtctacctcttccatctggaacattagctccatgagggcaagcacgtgactatcttgttcgcccgtgtccccagtgcccgatctggtcactctggtgccggaaagcacctgctggggcccagcctggagacagggtctgctgccggctggtctcctggccggtgccccgggggggcggggctcagagctgctgctcctctctgctgaccctctgtgttccgcccacccagatcctggtccacatcggcttcctgacggaggagtccggggacgtgttcagccctcgggtcctgaagggcgggcccctaggggagatggtgcagtgggcggacattctgactgcactctatgtcctgggccatggcctgcgggtcacagtctccctgaaggagctgcagaggtgagtgctggggaaagccactggcattaagtggggcagggaggggatgaaggggaaccccacccctccctcccaggggctgtgggagcacctgctctgcctgcaggtcccacggccctgagaccctgggagacatcctggtgttccgcaggacatcaccactcctaatccccctcctcctgcccggtcttgggggatgtggcagggaagtgtatttgcatagcgctgtctggccagggcctggctccttctctggtgtttctgctcaggggctgacacgtgttggcttgtggaattgagccacgtctgcacgtggggtcccctctgcctgccgtcctggaaggcttggtttctcttctgaacctgggctccttcttgggtctactttagggtctggagaccagtaagacatggaggatgaaggggcgtggttgggtgggtggtgcctgtcccttacccagtgctgggcttttcacggtcccttggatgctgtgggaggtggaagggcagtgattagaggctcccctgagtgtttgagggtaggatgggggtgaggctgagagtgtggggatgtcaagggggtaagagtgtgtgattgggtttatttttaatcactgtttctgtgggatgtaggaatacaggagattcttctctttattaatatttattgtaagatatatgatgcatacaaagtctatgtaaagtatgttgtgaaacacaacagtcaaatcacctcccatgtgtgaccatccatttaagatcatgctgtcaccaaggactctgggtttgcctgagagtgtctgccaatctctctgcctcctccccagatgaaaccttaacttgaactttgtgtatattattcctttgctttttttttttttttaatggagtttctctcttgttccccaggctggagtgcagtggcgtgaccttggctcactgcagcctccgcctcccgggttcaagcgattctcctgcctcagctcctgagtagctgggattacaggcccacgccgccacgccaggctaatttttgtgtttttagtagagatggggtttcagcatgttgcccaggctggtcttgagctcccaacctctggtgatccacccgcctcggcctcccaaagtgttgggattacaggcatgagccaccgcacccagcctgcttttgtaaaaaaagttttttgttttttcttaatagtgtatccataaacagtttatggtttgcttttgttttgttctggtttcaagctttgagaaaatggcatctactctatgtggtctcctaacttgctttcttcaaactcactctgtttcaaagactcatccatccatgttcttgcatgtagctttatttcattcattttcactgctatataatattccattgtgtgaatgtgccataattatgtatcagtttttcctgtctgcggatattttttcctgtttttgaaatggttttgaacgttgccgtggtggacattcttggacatgtcacctgatgtacttgtgtaagtttttctgggtatagacttagatgcagaattgttagatcttggcatggtgaaaattcagctttacaagataatgccgaattgtcttccaaagtgattgctccaattcagagactcaccagtgcatgagtttccgctggttcacattctcacctacacttagggttgtcagacattctgattgaggcatgatgatgtcttattatggctgcaacttgcatttcctgaaagataatgggctgagcatcctgtcctgtggttctttcgtcttgatgagatgcccattgatatgggcatcatatgataagggttatcattttcatattgagttgtaagagctctttatatattaaggatataaattctgtggaagttacatgtgttaaaaaagtcttctaatttgtggcttgcctttttaatttctttatggttttttggggagtaacagaaattcttaattttaatgtaataaaagttatccatctttttctttatagttagcaattttgtgttttgtggagttctctgttctctcttttctttctttttttcctttctttctctttctttcttctttttttttttttttttcagatagggcctcgctctgttgcccaggctggagtgcagtggcacaatcatggctcacagcagccttcccctcaagcaaccctcccacctcagcctcctgagtagctgggattacaggtgtacgctactacgcctggctaatttctgtatttttagtggagacagggtttcactatgttgcctaggctggtcttgaactcctaggctcaagaaattcgcctacctcagcctcccaaagtgctgggattacaggcatgagccaccgtgcttggctttattcctccttttcattgacttaaaaatgtttctattgatacataatatgtgtacatatttatggggatgggtgatattttgctacatgcatccaatgtgtaatgatcaagtcagggtactggggatctatcatcttgagtatttattatttttatgtgttgggaacattttaagtccactcttcaagctattttgaaatctacaatacattgttgttaagtatagtctccctactctgctatctttttttttttttgagatggagtctcactctgtcacccaggctggagtgcagtggtgcgatctcggctcactgcaacctctgcctcccgggttcaagcaattctcctgcctcagcctcccgagtagctgggattacaggcgggtgccaccgtgcccagctaatttttgtatttttagtagagacaggatttcaccatattggtcatgctggtctcgaactcctgacctcaggtgatccacctgctttggcctcccaaagtgctggaattataggcatgagccactgcgcccagcctctgctatatatatattttaaatcttatttattttaaaatagagatgggtttccgccatgttgcccaggctggtctcaaactcgtgggctcaagtcatctgcctgcctcagcctcccaaagtgctgggattacaggcatgagccatgtgcccggcctactctgctatctaacgtagaacttattccttctatctatctatatgtttgtacccattaaccaaaccaacctctctttatccctcctccccaccacatttgatgagattattcctcagggccttccttcagggccccagaactgtttgcatgtgaatcagcttttcttcattaacttctacacaggtggtttccttgtgagtccccaccagagcctgcctactctcttgctggtctgattggccttctctccactaatgctaatgctctgtagcacaggagtgttggagagcagaggatgctgatgaggacagagccatggcaatcttaggtcactagggcccagcaagcaccagtcttgggcagctactcagtttctgcctttcttcgctgcaactcagagtctgccagtaactcaggtagaacgtctgtgactccgatcagagggaggagtctgggccagctgtattgagtagtgggagaaggaggctgggtctggattgtgttgcttaggaggccactaaatgacccagggctttgaaggttttcatccccgtggcctgaaattcacagcactggagtcatccttttaagtgaatgcattcgatgattaggcttagtaaagaaaaagtgtctccagagaggaacagcacgtgtaagtgaggctatggggcagaggcaggttggtgccagagactaaagaggcagctacacgcctgtggctgtgttgagaagcactgtccaagtcgggggcgggctctgggggaggaaattctcaccttgaaatagcaggtccaggagctgcaaggaacccggctgggagctgtccccgagtgctagtgctgaacccacagatactcccaatgctgggagagggaaacagcacgtccctcactctggctctcaccctggtgacatcttgttgtcagatccagctgttcgcactgtgcaggccacttaagagacaaggtgtggggcccactcgcccgcctgcacccactgctgcacactaaactgtctgccaccggctccctctgaacagagagcctggaatatgcatcgatgctgtctgtggagcagaacgctgcagaggcagttaacatttgcagattatgaaaagaggtgtatacactcatgcagcctccacatgcacccatgcatacacgtgcatatccaccacatgtgtgcacatacatgcatactcacccactcacatgcacactcatggacacatactcatagcctctgcacccacacatgcacacccactcacacacttgaatatgcacacactccacatacacatgtgcaaatgcatgctcctgcatgtgcagacatgatgcatctatacagacacacatgcacactctcttgcacacacatgcatgtccacaccccacagagaatcagtgttttctaccaagcaaggctccacttcctctcaagctcttgcagatctaaaggtgctccagggagaggttgccccatctctggtttgcagtttgttaaatgggcaggcccagggctgtgctccgatgccctggcccttggtcccctgtggggtgtatgtgtgaatgaacgatctggctcagacagggcagaatggtgtaaacagctcagctacctcaggggatcttaggaaggtgatttctaaatctgctaccaaatacaatttaaaaacaactaaaagaataaaaataaaagcaaaaccaccctccccaggagaattccccagttatgcctacaaaagtaacagcatcagctatggttggaatacattcagggtgggggttcttaaccctggctgcagcaaaaccacctgaagcactttagaaacttaccagtgtttgggcccctgtctaggcatctctgacttcttccatctggggtgggggcccaggtaacaaattgaagctcccagtgattctaatgggcaccaaaggttgggaattggaaaagcttgaggctgtggcttttctaagcccctcagcccagtacacagtctggcggtggggttgggacattgtagaatgcatggcttcttcagaaggccttgtctgtgtccccagtgcagtcctgggggatgggattgaggccccaggctcagggccctagaaaagatgtagaaagaatgggaggattcatcctgagagcacccaggatacccttggttgctagagtgtggcttagtggggggttgggccacagaggcaccctgtggaggtggcccagatggtggggcgtctggcatcatgcccagggcatcacgtgggaacctgctggcctggaatgcactttgtgccacacactttcttggatgtactttcttccttcttcctttctaaagtgggggcattgcattggtccccatagttggcggggtcagtgacagatgtgaggccagggtggaggcagaactgtgagctcccaggcacattccctgctggggcctctctgatacataaatgcaggcctttcctcacagtggagatgtcaatacagtttgagatgtggatgagcctcctagagctgccataacaatggagtgcacactgcagggcttacacagcaggaatgaatgaacagcaggaatgcatgaactgaatcctggcgctggagcgtgctgcaagtccaagagccaggttttggcagggcagggctggggcctcctgaggctgcaagggagtctctgcctcaggcctctctctgggttcctggtggtttcctagtgaggaacttggtgacccttgtcctgcagctacatctctacaatcatctctgcctttgcctggtggcctccctgtgagcgtgtctgtgtccagatttcccctccctataaggacctattggattagggcccaccctaatgccctcacgttaactccattacctctgtaaggaccccaactccaaataaggtcatagcctgaagaactgggggttaggacttcaatatgtcaatgttgggggtggaggacacaatgtaaacccataataagatggcaaccactggggggccctgggcagagttcccagcgagcaaccgcgagcccttcagggagaggcagaagcacccagggcctcacctctcagccctgggagccgttctgtgggagcagcaccaggttaatttgaaaacaggtcaatgggatgtgaaggtaatctgaattctgagtgtctcagcttggtttctgcgacagaaatgtctcccttggctggcgaaatgacctgcgtgggaggcggtgggacaaagacgcggcttgtacatttgttgtagtttattcgcagatgttcacggcagatgtcctggccactgatggagcaacaaggctggacggatgagccggtcccgctctgctcctcgggtctcggtgtttcaattaactggctcactggagtgacgtttggggcaatgtgcaggatctacatctggctttgctgctgcaagatgcttccggggtgagggaggtggcacgagggagccgtgcgctctgtgatgagactgcagcaaggtgatgtcagccagtccccgcccgcgccccgccgtgtgcggagggaagaagccaaaccctagtgcctgcccagccgctgcatcctgagacggcctcgtgcatgtgcaggtccagggtgggcgttttaaagttaagcctttcccttcctgctttcctagcatcagctgtgctcatcaattttatttgcacaatttcaagcatcattaatagtacatggcatgagaaaacattactgagctctttctccatccatgagtgaaattgggtttagtagaaaattagttgacttaactggcaaatgatgaaagcttgagaggagaatgtttaagtaaggaggactaggagggacaactcctggctgtcaagcatgcagccaggctggaaatctgcctcctgcctggggccaggtgcccaaaggaaaggctggggaggatccccagagaatgacgaaggtggggactccatctgcttcctcccgcacaatccactgtgaccagctgaggcaggtcttaggtttggaacccagagatcagttctggatatgactggcacagactgatctgaaccaatgcaaactgggcccagctgctggaaaccagcttgagctgaccagaaccaggctgacctgggcagctcaaaccagctccagggcggaggatgctgctcttctctgaggggagaggagaaaagcactgggtctagggcacacatgttgaaacagaggtgccccatggaggccactgggtgacgggcccaggggaggtgtggcatggagacagggtcttggccgttgacagtggttgaacacagtgtggttgaaattgtcaaaggatgggaaaacaggcttgaggggcacagacttgggaaatatcaacacagaaaggcctcttacaggcaaaggagactgaggagtagccaagagcaagccagatgtggagtcatgggtgcctgtgagaagatgcttctagaaggagatgtggccagcaacacattgctcattgaaaagccaagtaagaaggagactgaaaaatgtccaaagaatttggtcacatgaggctgggtggggcggctcactcctgtaatcccagcactttgggaggtcacggcgggaggattgcttgattccaggagttggagaccagcctgggcaagatagtgagacctggtctttaccaaaaacaaaaaaattagccaagtgcgcctgtggtcccagctactcaggcgactgaggaaggaggatcacttgagcctgggaagtcgaggctacagtcagccgtgatcatgctactgcactctagcttgggtgacaaagcaagactgtctcaaaaaaaaaagagaagaagaagaagaaagaaagaaggaaagaaggaaggaaggagagagagaaagaaagagaatttggccacaaagatgtcattgctgactttggaaagagcattgtggtgcagtcgtggggacaaaggtcctaaacccagtgggctgtgggagtgtggaaggcgggatggggaggacacagcagtcgtgagtgtctgcactcctccaaggagcttggccaggagccgggaggagaaagagcgcaggagcaggggttacagaatcgcaggcaggtgtgtttgcctcctgggggtgaccagtcaaaagaccacatgctggggggtgtaaaccacacaaatgtgtcctcttacagtcctgaaggctggaagtctgaaatcaagactccctctgaaggcactagggaagcgtcagtcccagcctctcccctgtcttctggtagccgcaggtgttcttagaggggtagatggtgttctccctacgtccacatctcttcctccctccatgcatgactctgtgtccacatttcttcttcctctttttttttttttgagacagagtcttgccctgtcccccagctggagcgcagtggcgcagtctcggctcactgcatcctccacctccgggttcaagtgattctcctgcctcagcctcccgagtagctgggactacaggaatgtgccaccatgcccagctaatttttgtatttttagtagagacagggtttcaccatgtgggccaggctggtctcaaactcctgacctcaggtgttccacccacctcggcctcccaaagtgctgggattacaggcgtgagccactgcccccggccacgtttcttctttttataaggacaccagtcaacttggattagggtctaccctaatgccttcatcttaacttgattacctctgcaaagaccctttttccaaacaaagtcacattcacaggtacggggattaggacttcaccctccttcagcggccacagttcagcccacgatcaaaggtgtgcttgtttatttttcgagataagagagtgcactcatgtttaaatgtggctgcaaaggagccagaacagtagggaggttgtggacataggagggagagagtattgctggcagtggcttcaggggagggtcccaggaggagggacagggacagctcttctgccctgagaggagagaaggagaagagaccagggtatactgtaaatgcagcggggtggggggcctgggctgggggccggggatcgggcactcctctctgacggtttctattttatcttcgatgccggaggggagagcatttcccacaagccaggtggaggcagcgggagacgcgaggaagtggacaagaccgaaaaacaaccctcgggctctaccagggtttgtaatatgctatccctcgaaacaaacaggattcgaaccaaatatggcaaaatgttaaggcttgatgaggctgggaagtgggcgcattggagcattatatgattttctataattttctggatgcttggaatattttgtaacttataagcacacagattaggaaaaggtggggaagaaccgcatcttggcacctagacttgtgaatggcagctctcctgcatcaccctccccgttccaagaggaggcacgagaggccgacgattacaattcactaaaaatccccggcccctctcctgtctcctttttccttccccttccttcagtttcaaggaggcattttaacctcctggctgagcggggagcgagcgcaggagcacacatcccagcggagaggcctggcagccagacacctgacccaagttggctggcggtcagaacccttccccaggaaattcagacttgggtaggcagaagacctacctagactgcgggtaaggggacagagagggagcaggcgccggcatgccgagtgtggcggggtcacgttgagtgccgccaaatgtcgtgggcctctgctgctggggcctggggctgccctggcccctgcccttcatccttcctcgggatccaggagagacccttccttgcaaggcctcgtctccccttatgctccacatagctgcactgccctggcccctgcccttcattcttcctcgggatccaggagagacccttccttgcaagggcctcgcctcccctcatgctccacgcgctgcgctggcgtcacagggagtctgtttcttgcaagtcaaggccccccggccaagtctgaacattgaccaataagcaagaccgatggaggccgtgccgtgtcgcctttcccagctctggcctggcctgtgttggggagggctgcaagggaagactcatggaaatgacgtcgctggccctcatgagagatccatgcaccccaggtggagtggggagaacttggggagatcagataagaaatgaggacagaccaggccctcggctcatacccgtaaccccagcactttgggaggctgggattacaggcagatcccttgagtctaggagttcaagaccaacctgagcaaggaaacctcatctctacaagaaaaaactcagaaagaaatgaggagaagggctggcttctggatgctcctgacggaggcaggattcatccctggggaggaggcatcagggcctctgtgaatctcaggggtcgtgggttctcgagaagggatgaggggaccagtgttcttcctctgccaaggacagaccaagagagcgtcttgtcagatggtggctggagaggaggaaggtggcagtggacgagcttcaggaaccatctgtcagggagactggaaggagccacccacgggaagggtcaaactcaggggttcccgcctcttagaaactggggccagggctggtctggggctttttattctgggtgaagccggcagaagcacagggtggtacgaataaccccctagcactcttcccgactacgctgtcaggtttgagtcagcctagttgtgctaagtccaacgccaggtgggaggtttcactgtgactcagtggccaattaaatgctctcaagtccgggtttagtgtgaggattttgcacaccaaccatcactgcaaatatattcagcacacacaggccagtggctcgggatacgagtgcgctgactgatgagccaggcaggtccgaatgttcctcgaagtcagtttctttgctgtgtctccggcctctgcagggccgtccatagtcatttctcagctgcccctggcttcactttcttgttgggtctcgggggtgccttcccacagcaggtatctcgtcaccccagtccagcatacatttatcactttgaaggatcagcagtttgaccgtgggctgagtcacttgtcataagtgactccattttgagattatttaggatcacaaaacactatcctatatcaccacctgcccctcaagtcagagtagctttggtaaaaggaatgcattttcctgcaagccagactgctttttcctcggcatctctagcgtggagccagcggccctcaatatccgaatccaggatgcaggggctgcgtcttagcttttggccctcatctcccactgagactgctcgagtgggattgacagcggagtcttaccccaaggtccctgcacaggttggttctcagcaaaggttggtggaaccggatagaatagcaagagcccctggcacacaggagtcacccgaggagctgaaaataatccccgacgcccaggccccagcccggagcaaatagagggaccctcggggtggcctgagcaccaggagctaaagcctggatgagaaaacctgggttcgggctcagcatttacaggcatttattctagaaattgaggcctgtctgtaaggaagaggactgggaacgaccggagggccgagttcccgttcctcttcctgcagccgtgctggcagccagcggggtgagtgtgtggtctcctccagctctcctgggagcatggccctattcttagcactgagtttgcttgctaggaaagaacgctggggaagaaagtgccagctttggacgccagccccactttgggtctgcagtgttgaggatacgctgctccctcagtttccctttcggaggctcccccccaacaactgcacgccttgtaccgcacccccacccccgcacccatgctttgtggtagcttcggctaaagagcacccagactgtgcctccatctgcctttggactcccttttcctctgagccagggaccctgagggggcctggcagttctcagctgtagccctgaaccctcgagggcacagggtacatgctggggatgctcaagggcatcgccttttcaggagatgggagctgagggcagggccatcccagtgactgcgtaaagcaactctgggctgcttctgttgggtacagggaggtcagtccatcctgggcaggaagaaaatgctgcaggacggtgtaattctttcctcattagtgatcctaacccctgcttcctaaagcagctcattagatgtccagttcaacctctgagtttcttctttctgcccccatctggtctgtcagggaccagacagtggcctgttgtggtaatgggccatggcagggttgggggctgcccatgatacttgggaaacgggcactggtcaggtttggaggatttcagggccctggggagacagaacgtcccaggctgccccagctgtgtgttccccttgagaggcacccagtgaagttgtggatcctgcctgcacttcagcccctggagtcaaagatctctgactactttgcaaggattctttttaattaggtccctcccacacaagagaaagagagagagaatagtgtgttccacaatttgagcactacctggagagattatttctagccacagaccaaaggcacagagagaaataaaaccagggaatttttagcttagaagagaccgtggagatttgcctgagcacgtgtcccacatgtggaggcggacaccagagcgatgtggtggctcgtggaaggctacccagcaaatgcctgctggagctcctgcccagggatatttttcattgccagaattcagcatttgaattcctagccgagggtttcttctattaagtgaaggtttatttttctcctccctcatcccatctccccatcctcctctttgatattttagcaaagagtgcctgagccagtccttccctggatatttacagagcccctatattgtttatggccagctgggagtcccaggcaggtggggaacgtgacagctggagaagatgggacctcagcccctctgggaggcagagtgcttggcacgggagccaggaatgtgaatgggttgacttaaaaattatttttaaattattcgtatttttaagaccgggtctcactctgttgcccaggctagagtgcaacggtgtgatcacagctcattgcagccttaacatcccaggttcaaacgattctcccacctcagcctcctgagtagctggaatgacaggtgcatgccaccatgcccggctaattttttgtatttttggtagagatggggtttcgccatgtcatccaggctggtctcaaactgctggactcaagcgatcctcccacctaggccacctaaagtgctgggattataggcgtgagccgctgtgccgggctggctttttacaaacttgtagtaagatgcacataacataaaatgtgctgctgtaaccactttgaagtgcacagttcagtggcaaagcacactcgcattgtggtgcaaccatcgccaccatccatctccagatttcttcttgcaaaactgaaactccatacccattaaacaataatttcctattccttcctgccccgagagggtagcttttccgggtggattaatttgggcacagtgcaggggccaactctaaccaggtgacctgcggaaatgctccattcccctggaccaccctacccctacccctttcctcttgggatttagactcctattcatctggcctggggacactcagaaatatattctaaccagccagtttggcaattccacacaaacttccccgtccttcccaagcactggctgttggcagtgggcagatggaggggtatgcagcagatgcatttcaagttccttctgcccctgaggtcctccccccaccaccctcctatctgtgggggctgctgaaccgtcctcttgacccagcccttgactgagagtacaagagaaatgaggacttggccttggaggtgcagaaaggtctggacgggagtgttttgagttttcagcaggattggtggaaatgcacagccgagcctcccgggcacctttggttgaaggttgtcgggggacggcattttcaattcatgtcactgctccagccaatcacttagcgtaaaattgcccatgaaagtaaacttaaattacaagtgataaaactacagcctcctctcccagcagctgacctctctgctctccagggggtgaggctcagatttcttctgataagagcaatgaggccgctgcagacacctccagggacgtcctgcccttccattgaaaatccttgttttccagggctggggacatgtgggcttctccttaactcctcctgggaaggggatgctgctgtctccgggccgatttgtctccctcctctcccgtgatgtcctttgagcacgtggaaggccactgggctcaggtccagacccaaaggccagtgagtgaccaaggcaccttcacccctgggcccctcactcacccatactctctctccagagaggcttttcttggccaactattaaacattgaaaccagttcttctcatctaccactttgtgtatagcttcataaatacagcagatgtttagtgggtcaggtcctgtccctggtcctgaatgttaaagatgacctgaccctgccctcctcaaaggggcctccaggtgggaagaggtgacttgggacattgaccaggtgtgtcccaggtatggagggagcatagcgggaggggtgtctcaggtaaggcttcctggaggaggaggcaatatttgagttaagcacgtggaggtgagaagagtcttctagacccagggaacagtttctgtgaaaacagggcaccgtcgcaggagaaccttggtaggatcagaggggagggtttggccgggaccaccttgaaatttctgcggcacctggcctcacgtgtgacaggtacaggaagtgtccggtctcacttatcttagtcgcacactggtgacagctgctgtcttattgtagattccttctcccccatccgttaatattcctccctttcttctggtttagtcaagactttgacttcacactgagcagggtgtgcatgggggaagcgattgctcagcagggggccccttttcctgcccggctctggatctgggtgccaaggtttagggctgatacttcatggggtgaggcctgactgcccaagcgggtcctgcatcaggtggggctcagcgggggtccaccttccacccacttccctgctccctccatgcacacccagtgggcctgtgctggagaggctgctgcagatcctggggggcgcagggtgtggtgcaggggctgcagctgttgcttccacaggggttaggtggggaagcatcctcgaagtcctggctcagaggcagtgggaagcctcggaaagggtcagaacccctgggagatgtgatcaagtttccattgtataaagactctgatcccagctctgctccttcctggctgtgtaaccttgggtaagttactcagcctctctgtttcctaatctgtaaagatgggaacaggatgagaatgggtctgatctggtagggtagttgctaagatgaaaggagctgatgaatcagtaagttgaaagcacatggaatgatgcttgtgtccaaaacgttagccttgaagatggcgaggatgatggactcaccttagaaccgcagcgtggtggtctcccaggagagggctgtgacgtgctacaacccctctgtcctctcagtggccctggtgtctgggactagggtcagaggtgtgctcagtgatggggcagcaaaaggaagctcccaggacagagagataacatgttgcctggaaaccaaccagagatctgtagggaagccagtcatgttcctggtgcaggtagcagctcctagacccacctacggtttgtattttcaggattgtcttaattttactagacccagattccatgtgggaggagcagccacccccttcctggtttctgcaaggaaggatacagagggagtgtctttgtgtccttttgtgtgtggttctcagttgggttggggaggtgaggaagaggggacttctggagccccagggcaaacaaatgaagcttctttctgggccatcagttttactggaggagttttgggagtgagaaagtccatgcttcacaggaaacaacagggatgtcttgcagagtgaatgcagaatttgttcaacacttaaacctaccaccaaatatttcatgaagtctccaggttgtgggagttgttccctgtgatggctccagacccctggggtctgtgcttcttctcctttgttttctgggtatttcagccaaaaagctgaagaggcaggcactgccttagaagccctggatcagagaatcccgtgtggcaggtggtctgtgttggaaggaggggaagacaggaaggttggagggatggaggagcccttggccatttttaagtttatagacaagaaatgaggaggaaatggtgattaggttttcacattcccctctcacacttagcagcaaaggttctgacatggcggggaagccagtgtggggacagctcaggaggctggtgggggtactagctggaggtggggggcaaggcccagagaaagcgcctcccctcttgctgcccttctctgcagggcgaggctgacctctgatggcttagtccctgtgctggcagcttctctccacctctttccatcacagcgctgtcggcaggtgaccagaaacatcatcgacacggcaccactttggacggtgtgctaacgggatggtgcgcacagtcccctccccgagcttctgagcatgcgcaaagcgagcatgcacctttcaggccggtacttttccacctggcctgaatggtttcaaggagcccagacacagcccaggaaactgaccaatcctggccacttgccgttaatgaggaggtgaccttgtcaaagctcatcacctccccagcctgactctgcttatgatgtgggtccctgaagggcctccctagtaggaggtgtcctgggcctcctgcagagctggctggcacctgaaccctgaatcctggggaggtgggcatccccgggagatgggacccgatggcctggctgcttcccagtctgggttgggagcaaaggatggtcacatccagccccatgaggtgatgcacccaccaagagctgttgagagaggaagatgaagacagggcacgtggccttctctgcttgggcatcccccctgcccatccctccaccaatgggcctctcctcaggacgcctccaccgtgcctcagcacacgctgatcagatctctgctccagcacccccaggtgtacacacctcacacggcttgtgctcctggggctggggacacatcccacgtgtctctgagttcgtgatgtgggcaaaaggcctggaacccgacgtgcactcaagaaacatttgttaaagagaattatcctgaggacccagtggggagggggtgtttggggaagcgggtgcctgaccgggttctgcatgcattctgagctcccgggcgtcctcctctggtggagtggggatgggaacgtggaagggccgtctctgcggaggacggtacatcccacctgactcaggggctcggcatagacttaactgaatgaataagtgaccggatgcctcgtcatcccctgcaggggagaaaccgaggctgtggagttggaataagcaggggcttctggcgggaggagctggtttgtacggatgctggcagggggggttgtgggcagaggaatttaaattggcagctgtggctgctgggacagggggctttgaacccttctccagggaggtggactgagcagatgtggggattctagaggaagccatggggtgtggtcatgtccttccatgtcctcctgtccatacccctggagctgggggcctggggggtccagcaggaggagatgacccagcagctccagccggatgggatgccagatggcagaggggcaccacccctcctctggccaagctgcgtcttccaggtcaccagaggcaaccttgtcccagatgaaaacctgtgtgtaaataacccggcaggtgaaggcaggcaggtcctgtgcggtgcccggggtgggaagcaggtaaccagtggcctgcagcagctcgcggcctcagccagccctgggcgccaggagctcagtcagcactgcaagactgcacttttctgaggcaggaggtttggggccctcatccagacaaacacgtagctgcgctgaggactgccgccagcatccatgggatttgtgaaagttagagaaaggctccctctctgggtagccacagccctgcgggagcacatttgtgtcgatgacaaaaggtgccccttcttcctggcaggtaacccaggctgggtgcacgggagcccacgctgacctcagtcccacctgccccttgctggattgccttgtgcagtgaaaaacctacgttaccgtacagggccatcctgctcacttcctttctgagagtctgtgctaagctctctgcacttgtacagttcattctgggctctaaggaactggggtggccggttgggcaggtgggtttcttggggcccagaatctgaagggctcttctctcagtaacttaggggtaccgccaggccggggaagctgcccgctcaccatgcccctgcccttcgacctcatctacaccgactaccacggcctgcagcagatgaagcggcacatgggactctccttcaagaagtaccggtgagagggcggccagagggtgggcacgtggcccacatgccaggggagaaagctcctccttcacgccctgcccccacgtccccactcagccagctgggcccaggtgggagaacatactgtcctgcatcctgccctccgccctcccctcccctcccctgccacttccgtgtctgcctcccggctaactcaatgatatttaataaaccacccagggagttgctccatcacccctctgctgctttgaggctgggggcaggaggccggggtcatctacatggagcggagctgaggaattgaagagaagagtataacggaacaggacattaacctgggctgtgaccctgctgtggggaccttggggtggggagagcagctcagcacacccctctcttcctccaccccaccctctctccgtctggaggaaggccaaggccatcgctccctgtctcactgcagccagtgggatgtggggcttaatttagcacagagagccctgctatttattacgtgtgctccagtcccattgacgatcccacatgattttattagggaaaaaagtgacaggcagtgttattgcttttattattaatgcgagttctctatgcactcggctctctcctcccaccccgggcctcttccctgggggaaaagtgccaacctcagcactctgcagacaattctgggtcaccaggaaggacgctggggtgaggagctccttgcagggcctctgagtcttggcactttttttcaggtgccccttccagggagtagggagggcagagggggtggctctggggctgtggcccattgagaatggcctcggagttcgtctggccctgtggttggcttatctatagggacaagacccctctgggttttgaacttgggcctccacccctggagacagcagagggagaagggccctgtggagcagagcctctgcccagctgcagggtccagccctactgggaccagccttgcagaggaggctcagaagcgctgccctcccaaagacagcccatgggcagtgcctgggaccctgccttttgcatcctggccctatagactgggcacatccaggggtgtcaggctcctgagaagaggggctatgactccctacccaggcagatgcaaattgtatagaggacccaggggacaccagagagggaccccctctccaagcagtgcctcccttctgggtggcagtaatggctacaattcctgagtgctaaccaaggaccatgggtcaggagcttccctacaaccctgagacaattgggctgttgtttttcccactggacagatgaggcagcacagagaggtgaagacactcacctgtggtcacacagcagggcagtgtcctagtccaagtgctaacacacactgtgctactctgactccaccactggctggtgacagtgctcgtggctggggcaacttcagcccagggacacacggggaggttgctgaccctggttcctggtcccctgggggggcaggtgccgaatcagggtcatcgacaccttcgggacggaacctgcgtacaaccacgaggagtacgccacgctgcacggctaccggaccaactggggctactggaacctcaaccccaagcagttcatgaccatgtttcgtgagtgccccacagggcaggggtggggtcggaggtcctcctcatggttctcagaggtgacacgagaggcggccagggtctcgctcctccctctctttccttctccagccagtggggttggtgggacccagcaagcatcgccttctcctgctccataagtgtgtgaaccaggaaggaagcctctggtgctatttggggagcaggaagcatggagggggtgtccagggcggggtgacctccccgactccagcagatgtagccttcaccctccaggagggaggttgggcacacagttccagaacacgggggactccgcggccttccagaaagagaggctttccagagtaagctggagaacttccctgggtagaaaggagcaggcaggcagtgggaacagatgcagtaaagagggatgtgggaagaactggaaggttctggaaatgcaggattgggcttggcttccagggctccaggcaaggaacgtgagtggagctgggcttcagctatttgtttgtttgttttttgagacaggatctcgctctattggtcaggttgcagtgcagtggtgtgatctcctcggctcactgcagcctcgacctcctgggctcaagtgatcctcctgcctcagcctcccgagtagctggctttacaggcatctgcccccatgcccggctaatttttatattttttgtagagaaagggtttcaccaggttgcccaggctggtcttgaattcctgggctcaagcgatccacccacgtaggcctcccaaagtgctgggattacaggtgcaagccaccgtgcccgggtttcagctgtttttaatgatactctaaaatgtatacacacactgacctatcctgttaaacgcagctcactgaaaacaatttcaccttttcttgacagctcagggtcagttctctgcctcccgggcgcatgggcctgcccttctggacggcagaggtgtgcggagctgcgtcccctcctcgtgtctggttcacgctgcgctcttccaccttgttgggaggctctcagctgtcacttttaattgttgtcagtacatctgcctccagcagcatcttgcgtgtggctctttcaaggctccaggccagaaagctagataagtagccttgttaggattgcatctgttaaagtaagagcaacgtagactctgagcagagtcctgacggacttgcttgtgagtaaagtatgtgatttgtatttggcctgtcaaattcatggcatctcttgtgggtgcttggactattcttttttttctgattctctagactctaggctatattaggggcagatgtgatttttgaataaataagtaatggcatcattgaatcccagaaggttgggaaagtgggaaggttcctggggctcatgcagtccagatgagaaaactgaggcccagagaggtagagcatgcagcctgaggtcacacagctcagtcgggaccagactccttctgcagggcccgtttcaaggttgcatgagacttcttactgtgctcccagcagaagagtgcttggggtagagcaagcacagggagcagatttctggagggaaaggaaatggggagtggaaatagaggcagggaggaaatgatggtgctccgggctgtggaagaggaaaagctacgaagttgagaagcttgggtatttagatcacttagaagggaagcagtcaagccaggcgcggtggctcacacctgtaatcccagcactttgggaggctgaggcaggcggatcatgaggtcagaagctcgagaccagcctggccaacatggtgaaaccccgtctctactaaaaatacaaaaattagccgggtgtggtcgtgggtgcctgtaatcccagctactcaggaggctgaggcaggagaatcacttgaacccgggaggtggatgttgcagtgagctgagatcgtggcactgcactccagcctgggcaacagagcaagattctgtcttgggggaaaaacaaaatagagaaaaaagaaaaaaaggaagggaagcagtcagattggaggctggtaagaggagcatggaggatcagggcaccgaggagtggggtgttttagccaaggttcctgaattcacgtcggaggaccactgaaggttcttcagctagagaatgtcatgaataatttttttttttttgagactctgtcactcaggctggagtgcagtggcgcgacctcggctccctgcaacctccacctcccgggttcaagcgattcttgtgcattagcttttggagtagctgggaccacaggcacacgtcacttagcctggctaatttttgtatttttagtagagagagggttttaccttgttgcccaggctggtcttgaactcctgagctcaggtgatccacctgcctcggtctcccaaagtgctgggattccaggcgtgagccactgtgcccagccagggcaacatttttattgaggtgtattatcctgtcggactgcaggtggccaaagatgatgaagcagggaggagggggaagcagagatgggttaagaggcttctgcaatatcctgcactgagaaaatgaggacttgtcccagggtggagcccgctggatgtggatttccagacctggcaaactcctactcatccttcaaaacctcaagtgaaatgtctcctctttttaccatcactttcactgatcccctcatctcctactcctggcagaatgtattgcctctttacctctatttttataattcttaaacttaactccgttaaagcatatgttgaagtatgctagttatttgcttatacatttcttttccctgatagatcatgagccactcaaaaaggggccactaattggtttatctcaatctctctggagccaacctaggtcctcagagaacattaattgattggataaatcgaagaaagtggggacaaaagggaagagggaggctggccagttttaatggcacagagtccaggaaggaagtcatgagcaggcctgttcccatctagctggctgatttctccagggagctaactggggggctgctgcctctcctggccttaccctcgctctgcccccaggagctcttggcttaatggtccctgttattttaattggttgcaatacttccctgtccctctctgactggcttagctaattgtgttctaaatctgcctcttctggtggagttggtggaatgaaggcagtttagtgaaagattcttcagcttcagagagtggtgggaacaggggagagggctgggtggcagtcttggagaagccagaggggaggggaagatggtgccggacaggtaaacagggtcgggcaggggctgctttgcctggcatggacagagcctcctgagatgggagagctgtcctgaccctgaccacccacagaaagaactccaggcttccagggctcctcctgaccctcccaaagctctagaggagagatcgtttggttctgtagttgaattttcaggcccaagaatctgtgagctttgggggcacttacacaggaaagcatcatctcttctaagctgtaccagatgttgattattacgtcttgtgggccttgaggggtgggtgggaatactacagtagatttacacatttgatgaaagcatgcatcccaattggagaaacgttaaaatgtgggggatgtgcattcgaaatgaagaaatagggtatttagaatcaaggctgttgtgggaaatcaaggctgggcagctgctcccagcctcctcactcaccatagccccttccgtgcgggaaggtagattaaatatccttggactcaataaacggtttattcgggatcccagtgcgcagaaggcagggctcgtgtgcctgcagattcgtaggtctcatgttcctcttaacccctccgtggcggacagagctttagcagtcactgcactccacacacggccatggaattggagcgtgagatcaaacatgttccctggccttggtgtgtaggagggtgtgtgtccttatggacaaataagtcaaatggcgaggaaatcccggggcaatccctgctgtaacagagacctaactgccgcagatggggccacaaagggaggcacagtccacccaagagaaggcttccaggaggaggtgtcgtgtgagaggggccccgaaggctgagtagaatttcctcatccgagacaagggaggagggcagtgcaggccgaggggacagcagcaggggcaacgcttggaggtgggaatgggaggcttttcccctgtctcatccatctttgtccagcattcataaagccagcccaggctctgtttcaggtgctggtggcacagaagtgaacaaaacagaaccattgtccacaaggtgcttttattttaacaattattattattgtttttggagatggagtcttgctctgttgcccaggctggagtgtagtggcgtgatctcagctcactgaaacctccgcctcccaagttcaagtgattctcatgcctcagtctcctgagtagctgggataacaggtgtgcgccaccacacccggttaatgtttgtatttttagtagagatggggttttgccacgttggccaggctggtcttgaactcctgacttcaggtgatccacctgccttggcctaccaaagtgctgggatgacaggcatgagccaccacacctggcctatcctgacaatgatacatgaacaaataaatgtatagtctaatgtctggtcggtaagtgctgtgatgaaaaataaagctgttaggggacaatgagtgactggggtcaggagagacctctcacaggcccatgagcacagttctgtatggagaggggttgtgtccagcagggctctgggtgggctggatggtcaaaggtgcggtgggagagaaatggaggcagagcctggtgattgtcgggcggactttggcatatggggttttgtgcggaggaggaacctgatatggcctagattcaaaactgtcatttcagagaaaagactctaccaagagagccacaggaatgaggaggcggctgtcagggtggtcccattgagagctgatatggcctaggccggggtgcagtcacggagaaggtggagaaagttctacctgggatgacagatgctgcctatgggcgcaggtggagggcgaaaagatgggtcagaagcttggggctccagggactgtgaggagggcagagtccctactggtcacccgggggcctcagcctcaaacagggggacttgatgacctcttaggctgctgctgctactgctggtggtgcttcttccttctttcttcttcctcctcctcctgttcctcctcctcctctttctcctcctccttttttcctcctcctcctcctcctccccccccccttcttcgtctttgtcttcgtcttctttgtcttctccttctttcttcttcttacacagggtcttgctctgttgcctgggctggagtgcagcagtgcgatcatagctcagctcactgcagccttgaactagtgggctcaagcgattctcccacctcagcctctcgagtgtctgggactataggcgcgtgccaccatgcctggctgatttttaaatttttaaatagagacagggtctcactatgttgcccagggtggtctcaaactcctgggctcaagggatcctcctgcctctgcctcccagagtgttgggattataggcgtgagtcaccatgccaggcctaggtttccttcagctctgatctttgtagcagtctccgggaagggggtcacaggccggggcactgattacaccctccccaccgcaccctgtgccccgccccctttcccacccctgccaaaagaggacctcttgggcggggcagtccagggaggcctggggctgcccttggttgtttggtgaccccattccttctgcgtgctcgggctgcagctcatacccccgacaactccttcatgggcttcgtgtccgaggagctcaacgagacggagaagcggctcatcaaaggcggcaaggccagcaacatggccgtggtgtacggcaaggaggcgagcatctggaaggtgagcgcggcccctgcgcgcgggaagcaccagcctgctcggcacaggcccccgcctgggtcccgcatctcctccttccaggatgcggtgccctcctcccgccccagccctgcatgctggaaatgtctcccatgaaccagttcaggacaaaaagttcctaactgctatttaaagacacccagcctaggagctgacagcttgtctcccggactctcgtaataaatgattccttaattgaggactgtgactaaatcttccacccttccaagaaacagatcaatagacaatgtaagcccagcaagggcgtcttcggtggatgggggggtggtcaggctagacttgggagttctgtgagattagaggcagagagaagcaggagaggcttagagattagaaccccatcttcagggttgggggccccagagaggagctgcctgcatggggtgttgtctgcgaatcatcactaacctgctgtctctctctctgttccttgtgctccccctggccacgaggcagctccaggtatggaaaccgcttgccgcctgccccctctaccctctgctcccttcccctctccagcagccactccaggggtctctccttgtgatgttctcctgactcaggctctctggggcttgtggctcctgtggatggaccaaggtggggaagagggtgatggggacagcagggtcctaggagccgtctttcctggttcctctgtcacagggaggcaagtcctgggaggtcaaggtcctgcttggcatggccacagggcagcccttgggcatgagagggaccagcgttggatgggttattacatcaagcaggtggcatgaggtcaaggttaataacgaagctactgatcaggggaagcccctgtatcctacatcaggcctgttacatgattattggatttaatcactctcccagctgtactggttaggattagatctggctgtcgcagggaaaccccaaaataatcgtgatttaaacaagatggaagtatattttctttcctgcttgcaaatttcagaggtcgggagggctggtgtggcgttccccggggtcttcttaccttgacccatcgtgtttagtttccaccttggccttgcctcatggttcaagatggctacaggtattagagtcattatatctgcatcccagccaacaaggagaaggaaggagcagagcgggacaccacgtttcccacactgctcatcagctccatcttggccacagggccatgcccacttccaggggatgctgggtggcattatttccaggcagctcagctcaatgtgcccagccctgttctgggttctatgactgaggaaggaggagagaaggaggactcagggggatctcaccatctgggttgtgtccacccaagacgctactgttcactgagagcttgctatgtgccaggcattgtgctaagggctcacgtgcatctcttatttaaccttcacacaatgaggtaggtgctgcatgtgatcctgcccactctataaatgaggacaccagggcacagtgggttagaaggtgacccatagctagtaagcgccgagctgatgttccagcctacatcaatctaagtccagagccaggggtgcttggccctgaccccacagcctgttcagcattatgaagccttggagaatggcagagagaaggcttgaaagcaggaatcaaggtccaagacctctgctgagatgtcagaggtcactgtggggtgtggagcggggagctgggagatgaggctccccatgccgattgccacagctgcagggaagcccgggaagctgtgggcactgggtgctggagaagagggcagagtcggagggtcgtggaacacacagggtctacttttatcagaaaatgctgttaagaaactggcccaagagaatgagaggttatgaagtctggaaagagaaacgttttatctctagcgctggaacttctgtgatagcccgaggcaatcctgttcagctagagacctcaaagaaactgcttccaaaaaaagacatctttgccctggtgtttgtaaccaaaggaagtcagaggtggctggatggagagaaaaatgaaagcagcatcttgggagagatgccttccagagtacaggggatcaggtggccgagaagcagaggaggaaggaggggagatggaaggtcaggtcatttatcatccttccagggagcaggagctggggacccagggcaaggcgttgggtgaactttgtgctaagcgggtctgtcttattctgcattccccagaaagtggagcctgaggctaaggcttaggtgctattttagtagagtgtagtcccaggaagcgaggggtgaaggatcaagggaatgaagcaggaaggaggcaaaggcagctggttcaggcccggggcaaacccaccctcatccctggaggaaacattccaggccctcagacagtcatctgggtgagcttgggtggaacttttcaatccgtaggtggcaacccatggataaattgtgaagccaactcagggagtcttgactagcctttttggttcgtgtacaattttttgtagaaacatatgctttcatttctcctgggtaaatgcccaagaatataatggctggttaatactgtagaagtgtgtttaactttttttaaaagttattacgaggctttcaattcttgaacaaattcatcaatgcttgggatggtcagtcttgtaaatttcagccgttctaacaggcatggaatggtgtcttcttgtggtttaaactagcattttcctaatgactaatgatgaagatatttttgtgtgtttatttgtcttccatatatctttttttttttttttttggtgatgtgtctttttaaaaacttttgcccattgaaaatattaggttgtttattttcttactatggagttgttagagttctttatatatcctggatccaagtctcgtatcaaatatatgctttataaatattttcttctagtctgtggcttgtctctctctttttaaacatatatatattatatatattatataattatatatactatatattatatacattatatatactatatatattatatacattatatatattatatattatataattatatatacattatatatattatatattatataattatatatactatatattatatacattatatatatatatatgtagatagagacagagagacggggtctcattatgttgcccattcgggtcgcaaactcctgggctcaagcgatcctcccgcctcagcctctcaaagtgctgggttacaggcatgagccactgcgcctggccttgtctttctcttaacagtgtctttcagccgggaacggtggctcacgcctgtaatctcagaactttgggaggccatggcggggtggatcccgaggtcaggagattgagatcagcttgactaacaaggtgaaatcccatctctactaaaaatacaaaagattagccacgtgtggtggcgtgcgcccgtagtcccagctactcaggaggctgaggcaggagaattgtttgaacctgggaggcggaggttgcagtgagtcgagatcgcaccactgcactccagcctgggcgacagagggagactctgtcccaaaaacaaacaaacaaaacaatgtctttcaaagagaaaagttcttaattttaatgaagtccagtgttttcttttagggattgtgcttttggtgttgtatttaagaaatctttgtctaacccaaggttacaaagatttctttcctgtttttttgtataagttttatagttttaggttttgcatttaagtctgtgatccattttgcatgaacttttacatataataagtaaaaagttcttttacgtttttgcgtgtagatatcatgtttcatgaccatttactgatgaaaccatccttcctccactgaaatgttttgcacctttgtcgaaaatcagttgaccacactgtgtgtgggtctatttctggagtctgtattctgttccattgatctgtttgtctatcttgatgccaataccacactatctggattactgtagctttataagaagtcttgacatcggtaatataagcctgctaactgtgttctttttcaaagttgttttgtctattctaggttctttgcatttccaaatgagttttagaatcagcttatcaatttctacaaaaaagtactgggagtttgattgggatttcaatgtttttttttttttttgagttctggaaaatgaatatgaaaaattgtagagataatttaagatcaaggatgactctattttactccagagagaatttacttttactcttggcttatagctgggggccctagcaatctcggatcaccttgatcaatatggtgattaagacaaaatggattcagcccctgcaaggactggtctagctctgtttcatccttttctctagggtggaattcctctgagttctaattccaaatatggagcttccatcagaggtccccctccttcagtgaaagaagggatgggcagataagatggatgaatgagaggatggatggatagatggatgagtcgatgggtggatgggtgagtggagggatgtgtgagagggatggatggatgaatgggtgggtggatgagtggatgggtggatgtttgagagggatggatgggtgaatggatggatgggtgggtggacgcatagagttatgggcaggtggacaaatggatggatggatggatgcatggatggtgggtgcatggatggatggtgggtgcatggatggatggtgggtagatggatggataggatggatgggatgggtgagagagagagatggatgaatggactacagagagctccacagctcctcagaggagcttagaggtcattaggggttcagcagatgccaagtggcaccacgtgaatccatttaaatgttggtccccatagggttcctttggaaagaaaacagtttcatggctaaaagtaatcctgaagcctctgctctagtccaatctctgccattcataggttttcagggccagagaggggcggggcctttcccagtgtcccacagccagttaatggccaacctgagactgggtccacatcttctgacttccagaccaaagggatctcctccatggactttgccttctgtggtttgcatgtggttcccatctcctcctcttctttttccaggggaaggagaagttcctgggcatcctgaacaaatacatggagatccatggcaccgtgtactacgagagccagcggccccccgaggtgccagcctttgtgaagaaccacggcctcttaccgcagcctgagtttcagcagctgctgcgcaaggccaaagtgagctcccatcccccgcaccattctcacacttgccggctgcagacactgaggtcaccacccatgcctgccaccaccactcaggccccttccacatatggacataccccagcatgctctgctgccctgagccccacatctggccagagcccaggggcagagatgtgggtgcccaccaggcaggagaggtcctatagagaaagggacctgggcagggccagcagagcagcagagccgtggctcagtgatggggaagtagagttggactgcccatcctcccccttgcagtaccagtccagccaaatggactcctgggtcaggcctagcttttggagacactgagctggggggtggttgggtgggtggagagaagggtcctggctagagtgccattgagccactagtcctgagtgactgcttcaggggtccctgagctgtactgctggagcagcagttgacacagtgggcaaaaccctgactggaccctggagtatcagctgaggctggagagtctccagccagcttctaggcaccccctcaccctcttttttatgagacagggtcttgctctgtcacccacgctggagtgcagtggtgcaatcagggcccactgcaaccttatattcctaggctcacacagtcccctcacctccacctcccgagtagctgggactattggcatacaccaccacacctggctaatttttaaattttttgtagagatggtgtcttcctacattgcccaggctggtgtcaatctcctgggcttaagcgatcctaccacctcggcctctcaaagtgctgggattacagatgtgagccactgcacctggccccaggccctctcttgatctcaccatagcttgtttcccaaggcatcttgggggtgtgtgtgtgtgtgtgtgtgtgtgtgtgtgtgtgtgtgtgtgtgttgggggcagtggagatgcttgcatgcagtgaataacctgaacaacctcacagaacagccctggattcagaatcatttattaagtgcctttgaggccagccctgtgcactcctagcacaagttacttaaaaaataataattttggccaggtgcggtggctcacacctgtaatcccaacactttgggaggccgaggtgggcggatcacgaggttaggatatcgagaccatcctggccaacatggtgaaaccctgtctctactaaaatacaaacaaacaaacaaacaaaaaatcagctgggtgtggtggcgggcgcctgtagtcctggctactcaggagggtgagacaggggaattgcttgaacccgggaggcagaggttgcagtgagatgagatggtgccaccgcactccagcctggtgacagagcaagactccgtctcaaaattttttttcaacttttattttaggtttaaggggtacatatgcaggcttggtacctgggtatattgcataatgctgaggtttgtgatatgaaggatcttgtcacccaggtagtgaggatagtacccagtagttaattcttccgtctttacccccttcctcctccccactctgggagtccccaggtgtctgttgttgccatctttatgcccataagtacccaatgttcagctcccacttataagtgagaatatgcggtatttggtttctgttccagctttaattcacttaggatattggcctcctgctgtatccatattgctgaaaaggacatgattttgtttttttttatgtctgcgtagtatcttatggtgtctatgtaccatactttctttatccaagccaccgttaatgggcacctccgttggttccatgtctttgctgttgtaaatagcctcacacaagttagatgctgaataaatgtttttgggatgagtgagtgaggttcctggaggtctcttgcaggtgcgggcctgcagctttcttggcctgaaacccttgttcttttcttcctccctccacaatcataaatcatagcctgatagagcaagaagagaccattgataatacctaattagacccccttatttcacaaatggggaaactgaggcccagagaggggaagtgcttgcccgtggcacaagatgttctgggctggcttttccagccctgttatagctcacataacaggctgagcaaaaataatcgctccaggcccagctgcctcctgtgaatatcccgaagcctcaccttgtccccggcatcctggtgcttactgggctgtggcggcccagccctccctgatcactgcgccccttgactctgcagctcttcatcgggtttggcttcccctacgagggccccgcccccctggaggccatcgccaatggttgcatcttcctgcagtcccgcttcagcccgccccacagctccctcaaccacgagttcttccgaggcaagcccacctccagagaggtgagtggaaagcatcctggtccccgatcaggaggggccgggacagagacccctgcaggtcctggaagaggcagactgagatgtggggcaaaaggagataggacaagtgtatggggtacctttctttgtccctgtcccactggcaggcacggggggcatctgcaatctctgtacccttgccaggtgttctcccagcatccctacgcggagaacttcatcggcaagccccacgtgtggacagtcgactacaacaactcagaggagtttgaagcagccatcaaggccattatgagaactcaggtgagagcagccacatacagttgagaccccccactagtccacactgctggtcttcactctgattagaaaacggtgcccccctctgggtgagttcagacttgcaggcctgggttggcaaaggtgtccatccctcccctggtcagacacagccctgagccagggcatgtggattggagaatggaatgggggatcccattcatctactcaggtgtgatgtgtggggaatgcctttgtgcagtgagcaacctgcacaaccttacatggcagccctggatctcaaattgtttatggagcacttttgagggccaggtgctaactgaatgttttcacgatggatgtgtggaggttcttgaaactgctgcaggtgtggctttgcagcctttacacagcacatttcaaaatataatgtgcatacagagcgtctgttaatgcggggcaacgcttcgagtagcaagggggcagaacaccctgggtctccagcgaacgtgggtgctggtgtgtgtaggtgcacatgtgtgggctgggtgagagtgaggaggggcttgtgcctgatgctcatctccgcagtggacatgtttgtggcttttgatcgtgccttgtgcttggctggttccttcattctggggaggctcagacctggtgaacgagagagcctcctctcactatggttctcctggatccccttcttgctatagctcagatgataggctgagcaaaaataattgctccaggccgggaatggtggctcccgcctgtaatccagcactttgggaggccgaggcgggcagctcacttgaggccaggagtttgagagcagcctggccaacatggcaggtttctcaaagttagggactgtctgagattggattcctccaggaagtaacatgaaaacagggattttagcagtagcttatttgggaggcaaccccaggaagcaggcacggaggtgccaggtgaggcagggtgtgtatcagcaggtggcacctggagctcatcaccacgggggcctctgcaagatggggtaggtcacatcccagagctgtcctgcccgaggagaaagaggctagggtaggtatcctcctcttcccatccatctgtggctgagggtggtgcctgggatgccagttcctgacacttttggcctgcacacagatgggctcggcaggccagagacagccttgaggtggagtcaccggtgacggagggtggggcgctgatggccctgctgcagggagaggttgtgtgaccttgtaatgctggatcctagcaaagcaccggcctagacagagtggggagggataaaaagctcccttgctagctctcaacgcagtgttgtcccctgtcctgggctggtggcttaagttctggcaaggccttgtagagcaaaagcaactagaggccaggagcaggggctcacacctgtaatccctgcactttgggaggccgaagcgggcggatcacttgaggccaggagtttgagagcagcctggccaacatggtgaaaccccatctctactaaaaatacaaaaagaaatttagacaggcgtggtggcacacgactgtgatccaccaagaggctgaggcaggagaatcgcttgaacctgggaggtggaggttacagtgagccgagatcatgccactgcactccagcctcggtgacagagcgagactccatctcaaaaaaattttaaaaagataaataggaacttggccccttggccacgccctaggaagagggccaggtatttgactggtaccagcttataggcttaaatggggctagaagtaccagtgccaggaaggaggccttaggtagggacctcagtgcataggaaagaagagtgaagggggttaactgattaatttcactgctggaaactgaccaaccccagccccctgcacggggaagctggcaacaaggcgtacaggtaggcaagggggctcctgtcaccccacagtctcctccagcttcttctcccacttctccacccacctccctctgctctcctccctctcccctccccttgcaaaccaatcctctaagacttctcctgcagaggggctcgggcaaggctggggagggggactacatagacttttccaatgtggggagcagcgtttggcccaacctccaagacacattgttaagctaaaagagcgagacactccaccttggggataacttgcccccccgggaggcccagaaagcggggtcgggggagggctgtgtgcatgaaggtgctgcgatagtcgcgggtatttctggtgggacacacaagaaattgataactgggggaaggactgactgtctgcggtgagaggaaacttccctttcattgctttcctgtttggtttttttttacatgaacatctgtttaattttgttaattagttaattaaaaaataacaattacaaaaggattaaggaagcaaggtattgcaaatctgaccagctgagatttgtgctgggccccaaaccaacggaggcccctctgccttcagacccctcccttctgtgggccccacccctccgcataacagctcaccccctcagctcacagcagctcaaaaacatttatgtgcccaagagtcacccggggggagggccttaaatgcagatcctcgagcctatcccgcaccttcccatttaataggacccagcttcgcgtgggaatctgcattttaaacaagaactctgggtaattctaatcttcccattttattatttttttaaaattttctttttatattatttgaatagagatggggtggggtggggggggggtctcattttgttgcccaggccagtctcgaactcctgggcacaagcaatcctcccgcctcggcctcccaaagagctgggattacaggcatgagccaccatgcccggcctaataattctattttagaaaacagatttagggacagctggtggaggctgagagcaaatgagggctgccatcatggggagtggcttgttctgcaagtcatgtggccttttacagggagagggagggaggagcggccaggatggggagaaagaggtgagaagaagaggtgagaagagggaggtctaagacacagcgagccggccccgggcctgacagccatggaaaaccagggcccggcaccccttctgtgtctctgcacctccctgggtttgcctgtggacatctctgtgtccagagcaaggccattcaaggtgatgccaacactggcttccgctgcacccctccctgctgtcattcccgcaggccagcagttcccaggcaggatcagcacctgtcactctgtcgagactgattagggcgcacacctgtaattagacctaatgggggtaatttccaggccaggcaggctggctcctccggcaggagattcgtggcaggcggaacgtcgtcgtcgtcgttggccgtgagtgtttgcttcacacagggacctttgaattatcttgtgacaagggcttacagacacaggagcaagagtaactcagagatttgctgtcacggagccggggagcggcatttggaggggaaagctcttctctggggagttttatttataacctgagagtgaagccttgtccccgcaagacccccagaagtgtgtggggctcagaggctcccaggacttcgtcatgagtgtttagggaaccagctggggcagcaactggctgccagggtcttcttgggccatcggctcgggaatgagagcaggtcgggacagggctgtgcagagcacggggcttcaaggctgggctggggatgggacctgcagattctccgggacttcgaacttgccccagcgttgagaatacccacgcacagtgcagggggacgtcagtgctggggcaatgtccggcttcaaggacatcagtgactgccgcttccctgggacccttgagtgtcagggatgtccccttggccagaggccccaggacgagtctcctaagaagtggggtacacagaaggcaggaccgagcttggcgcagttggactttctagcaccacccaacgctgatgaggaagaaaggaggtggttgcaggcttgagtcaaacagttagatttcacccactggctaaagacgggaaagcggcctcattaggagatgggctgggccaggtcaggtgccaccaggcatggtggggtggggaggttgaagcctaaaacagacctttctctgagtccgggatggctccttcctgagtcctgactgctgcccctgccctttcaggtcagtgattttctccacggtggctctgcactgggcctgagaaggttaatggaacaggaaggggttggttggttaagaagtcggggggaggcaggagtacccccttactcctctgtcactcttccctccactcccctggtttcttttacccaagctactgcatgcatctgcccacaggacaggttgctgtgtgactattagatatttatttatttatttatttttgagacaaagtctcactctgttgcccaggctggagtgcaatggtgcagtctcagctcactgcaacctccacctcccaggttcaagtgattctcctgcctcagcctcccaagtagctgggattacaggcacctgccaccacgcctagctaattttttttgtattagtagagccgggtttcaccacgttggccaggctggtcttgaactcctgacctcaggcgatccgcccacctcggcctcccaaagtgctgggattacaggcatgagccaccgtgccgggctaactattagatatttagacagacaacctgtggcctctgtttgggggtttgtgcctgtgggggcagggtactttacaaatgtcatctcattcccgctgactgggagatgcccctgtgttcctctgcatgaatgtcccatgtcttgggcaggatacaggcagagctggggatgccttttcattccatgactatttcctgagcacccactgtatgccaggcactgtgccaggcactggagattcagtgtgaacaagccatagtccccaccctcaaggtgtccataagtttatgagagacatgacgaatacacaggagacaataacacaggggctcattctgtgctgggggaagtctggggtgctgggagtcaccaaggaaagtgttcctgtaacaggagtgggggtggggctcagggaaagctccctggagcaggtgatgcctaagagggtgggtgggctgtgggaagaggaggtgtcaaagcccagtaggggacacagcgctgagctttatcctcattgcagttgggacagggacctgggagggggtggggagggatgaggctgggccttgtgggtcctgagcctgagtcccggagggctactggagggtgtgcggggaacggggactctgagctgggtggaagggccaggtggatggggtggtcggctccctgggcatggcacaggatgtgagagcccaccagacctccacccccaatgccgagcatggcagggcccccgacggctgggccttctcccgccccatgtgtctgcccatccctcccacaggtagacccctacctaccctacgagtacacctgcgaggggatgctggagcggatccacgcctacatccagcaccaggtcagtgagccctctggtccctgccccagatcctgtcagaccagaggagggggctgagccagcttcattgtctgcccagggccctgcacccgtgaaaccatccaactccctgctccctcctccagcctgtccagtctcttcccagagttccctcagggctggagacaggcaggcctgactgcgggcctggaaagcagcacactccgggcactcctgctgtctgggcccagccttagagcccaactccacggcactaacagaaacacaaagacttccgttcttagaaaacagtggttcgaaagtctgctaactgattgggatttggtaactgaatgggaagtgaagatccccagactctccgcccacctgctaaggatggcagtgagactggaatgggagattaggatctctgccctgagaaaccaggggacagccccacggtttcaaaaactcggccacctcagcccccgagggagcgcctgggcaggcacctgtccaaggagtacactccttctcctcccacgggtgctcagagtgcctggaagtcgtgggtgaggaggagggcgtgccctattcctggggagtcctggccctccactgcatcctggtggatctgagccaccatgagggctgcaggtggcccagatggagcgtggctctgcaggccccgggtgtccagggtgatgcctggggtgggccttgggctcagggccctggggcaggtggccgtatggctgtaagaaatttccacagatagtacgtgacctccctttccatcttgttggccccaccaatattaggggctgagagagtctggttctcccctgtccctttacagatgggaatactgaaacccccagaagggagagtgtattcaggtgagggggtgagggtcagggccgtggccagaacccaggactggacccagactggaagctcacagaaaagcattcgcggggccctccggcccctggagttgaaccctgcagggagagcctcacagccagcctggggccctgtccccatggagggcagggctcgtgggccccagggtaggaaccccagcctgacctgagcatcgaggcagctccagggcacacaggatgcagagggccctgaatccaagtcctgttctgccatccaaccccaaggccctgggcggatgccgtgacctctgagcctccataattcctgtaagcgatctggagacacgagtgtccatgagaagtaaatgaaataatgcaggtaaagctacctggtattcagtaagcgcccagtagtggtggctcgtactggcacggcagggccacaccttcaggtgtctcccaggcacacctgggtcgcacttccccaccctgacactgctctcctccttgcaggacttctgcagagctccagaccctgccctaccagaggcccacgccccgcagagcccctttgtcctggcccccaatgccacccacctcgagtgggctcggaacaccagcttggctcctggggcctggccccccgcgcacgccctgcgggcctggctggccgtgcctgggagggcctgcaccgacacctgcctggaccacgggctaatctgtgagccctccttcttccccttcctgaacagccaggacgccttcctcaagtgagtgttcccccaccctccccacccagccgctatcatcgctggcccagccgggttcactgagagctctcatgcccagaaccggccctcagccctgccagtgtggggggatgtaatgctttccaatgagtcaggaaggatccagaagggatcctccaggccattatccaggtcattgctgccctactcttggccaaaccctaaactaccagggaaagctccttccattgcctgctctcttccacccactcagccccctgcccagcctgtgggcatcgtcctgtcccagaccatgaaagctgtcccaggtgctcctcctactgggtctgcctgggtccccagcccctccaggccaggcccctctcttctccaggggtcccttggacagcaggtgggataaaggagccgtaacacatttccttacccaggctgggatgggatgggccagagaaggggagcaggcaggactaggctgggggcagcccctaccccgccccagcccttctgcccaagtgaccaacgctgagtgacggtgctgtgtggtccctgccaggctgcaggtgccctgtgacagcaccgagtcggagatgaaccacctgtacccggcgttcgcccagcctggccaggagtgctacctgcagaaggagcctctgctcttcagctgcgccggctccaacaccaagtaccgccggctctgcccctgccgcgacttccgcaagggccaggtggccttgtgccagggctgtctgtgaatccgcctctgccgccctgcctggcacccacgctggctctctcctgccgcgggagaaagcaccagcaggttctgagccctggctgcttgtcctcctcgcaacccccccaggccggagcttccttccttagccgggaagctggcagaggagagccgtgcccgggaataggaggaggcagcatgccgagcccctgggacctcccaggcaggctccggttctctcctggggactcacagaagcatcgtggccaagcaggtgtcggactgctcagagtccgcatggcccaggagcaggtggtcggaggcccctggctttgtgcaaggccggatctgggccaggtggcgaaaggggcccagtcgttcttgggcccaggatggggcctctagacttgcaagggagaggaacagggaccaggctgccccacggtccctgaagggtccaaggaggggccctccccatggccctggagagtgggcctgggtggtacctgctccaggcagggaaactgggggctcgcccttctcctgtgaggggagccaggcacacagggcccattggtgtttgggatgtggacagaggggcagggggctgggagaaggctaagccgaggggtcctgtttgtgcctccccttagtcccttccctcccgatttcccgattcccccaccctccctctacacttgaggaccacagttgggggtgtagggaccacccagaccctggttgaattgtttctctctcctgcttgttccaacccttttcactctgggcttctcccaaaacccatcctggcatgacctgcaactccaggtggtggatttgttccaaagcctcaatccctaccccctccaaggggcaggtttccagtccagcctcagagatcaggctctgggacccctgcctggggggtggccttcatgcactagccacttccgcaggtgctgactcccgcactccctggcattttttgcagacaagggcttgggatggaccctcagccccatggtacgccctgcccagtttccagttgccctgtccacttaccctaggtagccccccaccccatcagtgccgagtccttgtccctacctccagcttcctccagcctcaaaccgcctctggatctagctgtccttctccgagtggcacgcctgccccaggatgccccctttccctcccccccatgcccagagccccgcctgcctcagcgggtcaggccttcagaacactgccacccacccagttttataatcccgctccctctccaggcaaccccacccaccagcctaggcctgctcctccacccttcccgggaggcagccccgggatgctgagagttggtggaggggccaggctggacgcttcctgtgggagtcccctccagacctggctggcccctgcagccacagaaaccacgatggcaaaaaatctcattggttctcaaggactaacctgtgggggaaagcaatagagacactctttttctctcttttttttaaagatttatttcttgaaataataaatattttattgggatgtgaggtgcagaagaggaactgtgctggattctcgtcttttcctgcggcatccggagctcgcccagggtggagggcagacagccggggtccccgggttctgctccatgtcacttggggcacatggggtgctcaggtctgcagagctgggtgctgtctgctccaagccgcccaaaggaagtccctgctggtggcagtgacccagggtcatctcctggctgccccagagccgtgactgcaggcaccctgacaagcagtggtgaactcagtcatgttcacctcaggctggcctctgcctacctccagctggctgtgacagtggccgcacgaggtcagagaacacaaatccattttgctaagagcctgagccacataatgagaaaatgagccggtgtttacctcctcgggcactgggctgagagtttgttccatgcttgagttgtcatttcaagcactcagctaccctagcaggtaagtactattatgttaatatttccattttacagcgagaggcacagagagttcaagtaacttgcccgaggtcacacagcttgtaagcagggaggtgggatttgctataaaatggggatcattttcaagtcatggtgaggagcaaatggctggatagagtgacagcctggcatggtgaccctgcatgcacgtcttcgctccaggcttttttttttttttttttttgagacggagtctcgctttgtcacccaggctggagtgcagtagcacaatctcggctcactgtaacctctgcctactgggttcaagcgattctcctgcctcaggctcccgagtagctgggactacaggcgtgtgccaccacacccggctactttttgtatttttagtagagacggggtttcaccatgttagccaggctggtctcaaactccggacgtcaggtgatccactcacctcggccaccaaaagtgctgggattacaggcatgagccactgcgccaggccttcgctccaggttttatgtgatcctgtatttgagtcactgcacaatcagggccttccttcccaccaagggttctccactggggcagttttgttccctggaggacagctggcactgttttggattgttgtgacttgagacaggggtggcatgctattggcctccagtggggtagagtccaaggatgctggcagcatcctccagtgcacaggacagccataccacgtaggatgatctggcctggagcatcagcagcgccaagcttcacacaccctgttccaggccagtggttctaaaattttggcatgcatcagaatcacctgattcctgagcttactgaaacacatgttgctggcccccacctgcggagtttctgattcagcagatctggggttgggccctgggatttgagtctttaataagctccaggtgggcgggaggcttgcttgagcccaggagtctgagacgagcttgggcaacgtaatgagacctcgtttctacaaaaaaaaaaaaaaaaaggccaaggtttgtggcatgcgcctgtgttcccagctactcgggaggctgaggtgggaggatggtttgagcctaggagtttgaggctgcagtgaaccatgattgtgccactgcactgtagcttgggcaaagagcaagaccttgtctcaaaaaaaaaaaaaaagaaaaaagaaaaagaaagaaaaaggccaggcatggtggctcacacctgtaatcccagcacttgggaggccgatgcttgagttagagaccagcctgggtaacacagacctcatctctctaaacaaaaacaaaaacagaaaaaacctctgggtgctgctgctactactacagggggccagggcccatactttgagaacagctggtctagaccaagcaggtactagtaggtatttcaaacgtgagagtaccaataacttggtaccagtttttaattaacagtgactatggccattttcttctgttccagcatgtaatgccaggggagagacctcatacaaccaaatctgctcacagagatcaaagccacaggccatcagaattcctcctgtcccctcattttacagatggaggcccgaagagaacaggggcctggtccatatcgtacagctggaggaagagcccagatctcagtccctctctgtctctacctctgtccctctctgctatgctgcttaaaagaggctgagaaaagaatagctgagccaggcattttccatgatcttgtccagcaggaggggggtagggctcagaaacctgaccaaggccttcttttaggaactgagcctagttaggggaaaaaagaaaaaaaaggccaggtgcggtggttcacgcctgttgtctcagcgtttttggaggccaaggtggaagaatctgaggtagaaggatcacttaagcccaggagttcaagcaacatggcaagaacccatctctacaaaaattgttattatttttatttttttgagatggagtctgtcatccaggctggagtacagtggtgtgatcttggctcactgcaacccccgcctcccaggttcaagcaattctcctgcctcagcctcccgagtagctgggattactgggattacaggcacctgctaccacgcccagctaatttttgtatttttagtagagacagggtttcgccatgttaaccagactggtttcaaactcctgaccttaggtgatccacccacctcggcctcccagtgctaggattacaggcacgacccagggcgcccggcctacaaaaattatttaaaaattagctagtgtggcaagtgccggtggtctcagctacttgggagactgaggtgggaggatcgcttgatcacttgagcccgggaggtccaggctgcagtgagctgtgatcatgccgcaccaccgccctctagcctgagtgagagtgaggccctgtctccaaaaaaaaaaaaaaagactatttttttgagcagttttatgttcacagcaaagttgggtggaaagtagatttcccatatgccacctcccccacatacacaggccacccccaccatccacatcccctaccagagtggtccatgtgttccaatctatgagcctacactgacgtatcatcaaccaaacacagttcacattagggctcactcctggtgccgtgtattctacgtgttttgacaaatctttaatgagatgtatccactattatggcaccatacagagtggttccattgccctaaaaatcctctgtgctacccctgtacatctctgcctcctcctaaccctggaaaaccatgatcttccgaccatctccgtagtctcaccttttccagatcatcaggtagttggagccctacagtttgtagccttctcagattggctcctttccccctagtacctcgtaacatgcatctaacattcctctgcatcttctcgtggcccggtgcctcatttccatttagcactgaataatattccattgtctggatggatcacagtttgtttacaaattcacctactgaaggacatcttggttgcctccaagttttggcagttctgaataaagctgctataaatgttcacttccaagtttttgagtggaatccattttcttttctattttcttttctgcttataacagtcacagtcatttgttttgctcacagatctgcaatttgggcagggcctggtggaggtaatttgtctctgcttcacatggcatcagctgaggtggcttgccccaaggctggagaatcacttccaggacagctcactcatgtggctggcaagttggtgctgtcggctggggagctcagcaggggatttgggctgggggccatggttcccatccatgtaggcctttccaaggactcttgtgcttccgtgcagcatggtggctgggttccaagagtgaacatcccaggagaataaggtggaagtgaaaggcatttttttgaactagccttggaagccacatgctgtcaatgctggcatactctattggtcaagagagtcacaaagctcctcctgctgcagctcatgaggaggggacatagatgccacccctcaatgggaggggtgtcaaagtcacagcagaagaagtgctcgtggaatgggatatagtgttgcctctatctttggaaaatataatctgccaaagatgcagcttggtcttccagcatttctggactgttgtcctcatccggtccaagatgggtcccctctaaggcctcattccatccaatgaaagagaaaaaggagagggggagtcagctcatgctgcttctgattgtgctccattggccagagcttagtcacatggccatacttaggtttaccggtttattgtaaaggattttacaaagagtagagatgaagagatgcgtagggtgaggtatgaagggggcggaggacacggaacttccgtgccctccctggacggccacctcccaggaacctccacatgttcagctgtccagaagctcctggacacaatttccaacaactaattcgggtaaatgccaaggaacacgattgctggatcgtatggtaaaagtatgtttagctttgtaagaaactgccaagctgtcttcccaagtggctatagcattttgtattaccagccctgaatgagaattcctgttgctccacagcctcaccagcatttggggttgtcagtgttttggatttgggccattctgatagatgtgcagtggtatctcattgctgttttaatttgcatttccctgatgacatatgacgtgacatatatatttgccatctgtgtatcgtctttggcgaagtgtctgttcaggtcttttgcccattttttaattgagttgttttcttagtattgagttttaataggtctttatatatcaacctacttttgaatcctgtctgaacttttaaatgaagctgaaggggctggctggcagtagtgggggagaagttgagaattagaaagaatttgcagcccagatgtcagtgccaggcagagctgcggctcccacaccttcctctgaagctggccacgcctccttcagccctggcccaactctgaacagtggagggaagggcaggcacgggccggcctcaccaccgccctgccaggtgaccacccctccccactcacaggtgaggaaacaggtgtgatgaagcccctcagcccatggactcacctgagccaattaaaccaaaaaccaaaatatctaggcagggcggctcatgcctgtaatcccagaactttgggaggccgacgtaggcagatcatttgaaatcaggggttcgagaccagcctggccaacatggtgaaaccccgtctgtactaaaaatacaaaaattagctgggcatggtggtgcgcgcctataatcccagctactcggcaggctgaggcaggagaatcgcttgagcccaggaggtggaggttgaggctccatctcaaaaaaaaaaaatttcctatttttagagtcagggtctcactctgtcacccaggctggagccctcaaacttctgggctcaagcaatcttcccacctcagcttcctgagtagctgggaccacaggcatgcgtcaccaaacctggctaattttttttatagagatgggggtgggggggcgtctcactatgttgcccagacttgtcttaaactcctaggctcaagtgatcctcccacctcggcctccccaagtgctgggattacaggcgtgagccaccgcacccagctgggcatcagcatttcataaagcactcctctatgtgtctagtgtggttctactgtgaaccactgcacttacccatcatacctggctagctcctctctgcagccctcatggctttgccctccaaggagggagaggaggttgagtaccaacttggggaggcctcatttgaagccttggcctccagccccagcccctgggctgaagcaacttctcttgcagcccagggcccactaggctgaatccagtggaggaaaaggtgggggatccagctggacctgggggcaaaggatgcaaacaggcctcggctggctccaagacagtcctgaagttcaagggcaggagaaataacatgagtgggaggctggtaacaagttctgtccctcacagccagggaagctgaagggcagcagagaggacggggtcccaggtcccagcaggactgtaggaggccagctgcctgtggaggtccaggaggcagtccccaccctgggttcttctcttggcagccaaagcaccctcttagctgggcctggcggggctggaggccgagcagctagacctggggacctgccttccctgtgctctggccctgcagctgccccagctgccttggctgacttagaaggctcccaaagaccctgtatgttccctaaccccaccttcccacaccctcccctggggaagatctgacttctgggaggcaagagcccaggcagtttggggtctcaaaaaagaggtccgtagggtttaggtttgtccacccctttctgcccgaccacactggctcctccaagtatcggcctagcactctctaaaagggaatcacgtattcccttaaagggggcggggccctcttttcaggactgtgctagggtgaggctgccctgctcctccttggctgtgcaggtgcagaccccaccaccccatcccaacaagcccgactcagaagggaagatggggtgaaagccccgtcacggtcctcgcgagagccccgagctcctcaccaggctggcacctggcaccccaacctgctgcttcggaacttcctcttagtttgcacttcagcttcctcctctgtagaataagggacataatcctgggacacaggtgttttgaggactaaaggaggtgaggcaggtaagattccaggtgctgcctctgagatgaggtggctgttgatgactgcaagacactcagctgctctggggagccgcgctgtctccaggggcaaggagctgccgcccctcctagcaggagagcacagtaaggctcaagcggtccctggctcccagcctgccgccacccaagattggaaaccccaaacctgggggaacttctcaccgcggctgctggggggtggctgtccttgggcagaacaacacagaagatgctgtgggttgaattgtgttccccccaaaagatgcattgaaggcacccctggtgcctgtgaataggatcttacttggaaatagggtgtgtgcagatgttcttcaatttgagatgaggccagactggattagcagaggccttaagtccaatgactggtgtccttatcagaagaggacccggggacacacagggaagaaatccctgtgaagacagaggcagagatcagagccatgcagctgcgccagcaaacactaaggcctgctggtgaccgccggaagctgggagggcaaagatggacccttctctggcgccttcagagggaatacggccctgctggcaccctgatgctggacttctggcctctagaactgtgaggaaatacgctcccgcggttttaagccacagccggtggtaagtgactataacagccatgggaagctcacacagaaggggtcagacttctgctgcctttcaagataataagaggctgagccacgcatcccgagtcgggaggtaaacggccccctagccaggccgctggctccagcatgcagcccgctttgtcttttcgcagaaaagcaaagtgtttgctgaaaaaaggcatcgaaggaaagagaacacagctccccagggatgcagaccagtccctccgccccaaataaacacccacaacacagaccttcagggcacctggggtgcagaatccaggcgcttacagcaggagaagggggtggtccccaagcctgacttttcaggttgattctgcgctcctctgggactgggccactctccgagtcagcctgagatcatctccctctgagtctcagctaaaaatagtccaggctccgacgtctgcatatatttgaatattgggctcaagagaccgtgattctggggaaacggtgcagctggttccccctgatgttggagcgtgaagccaacagagcacgttctccccattaaactctcagctcccacagctgcccaggcctgaccaccagcgcctcttccttagagacccttcgtggggtgtcttctccagtctggggccccatgaagcagcccagagctgggtgggatttggcttttggagtgctgggagagtttcaggctggggtctgagccctgggagggctccttgagcccacagcagatacccctggcccccatggctcccccagccccatgctggtgcccaccccatccttggacctctgaaggcagagggtgggtggagactatgaatcccccggccttgtctcaagctggacttagacaccctcactttcccctctcttttccctctccccatcaccatccgttcagcaaacattctcccaggagcagtgcttggtaaggcactaggcccggagggtacagtctcctgtctagtagtggctgtgtcctgagcccctgtgtccagggctggggcctgctgaggactcaagtgggcttcctgaatctgctggtgcctgattttaatcagttctggagaccgctctgccaatatctctgatcttccttctcccatagtgacagaccctctcccaatctccctgtgctggggatgggtgtttttgctctgtccttccacggagaccgcagaactgaaggggcctggctttatgcaggggtctcgattctgcatgtccatcccccaggccacacctctcatctccgtggaggagtcagagtccaagccctggaccccaggaccaggaagcctcggcctgcgctggccacactcacgcagccaccgtctggttttcagctcctggttcactccggcccttgggcttcccctccttcctgcaaactcatctctgccttaagctggatgtggatgcttgtggttgttcctttcctttcctttccttcctttctcttcttccctttcctttctcttcttctccccctctcctcccctccgcttttcttctcttctcttgactgagtcttgtgctctgtcacccaggctggagggcagtggcgcgatcctggatcactgcaacctccacctcctgggttcaagcaattctcctgcctcagcctgtcgcgtagctggggttacaggcacccaccaccactcctggctatttttttttttttgtatttttagtagagacagggttttgccatgttgtccatgctgatctcacactcctgacctcaactgatctgcccgccttggcctcccaaagtcctagggtgacagagccaccgtgtccggccggtttcttttattttctggtgtttcatgaagaaaggctacgcagttcccgtgcctgacacaggacgaagttgttaaccttcccagaggtgctttcgtgtaaacagtggcttctcttctgggatacaacaaagaacgtgggccatggagtcagacagccctggggtcaaaccctgttttgggcccccatcactagctgtgacccacagagtttatgtctctgaaattttgttccatcacctggttaaatggggacaataccaccgtcttggaaacaaatggccacaaatttagtggcataaaataacacaatatatcttagtcctgaacatcagaagtccggaacggccctcactgggctaaaatcaatgtgtcggcagggctgcctgcttgcctcctggaggctctgtgggagaatccattttcttcctcttctgttttctagaggctgcctgcactccctggttctcgaccccttcctgcatctttagagccagcaatgaccagtcgactccttcctgtatctcattcctctgatgctgactctcctgcctccctctttcgcttctttttttttttttttgagacagggtctcactctgttgcccaggctggagtgcactggtgtgagcacggcttactgcagcctcaacttcctaggctcaagtgatcctcccacctcagcctcccaggtagctgggactacaggtatgcgcctccacgcccagctaattgttgtatttttagtagagatggggtttgtcgtgttgcccaggctggtctcgaactcctcagctcaagcgatctggccgccttggcctcccaaagtgctgggattacaggcatgagccactgcaccaagccttcaaatgttaatctcatccagaaacactctcagagaaacacccagaatgtttgaccagcaccttagcaccccatggcccagtcaagttgacagatgaaattaccatgacctcctttcagagaaggaggaaatctcatcacacacactaaggtgccagggtcagctcccatgagctcccagagacggttgttagattttcaggaattttgcaagccagttgttaaattgttagtatctccatactggccaggatgggagtattacaccatggaaactggcaagtactagaattcaggactttttcttatttgcattttgccttgttctagacctcgtatataaagatcagtgtgatcccctataaatatctatccttggggtgtgtgtgtgtgtgtgtgtgtatttttttttttttttttttgagaccgagtctcactctattgcccaggatggaatgcagtgctgtgatcttggctcactgcagcctccgccttctgggttcaagcgattcccttgcctcagcctccctagtagctgggattacagacacatgccaacacacccattaatttttgtatttttagtggagatggggttttaccatgttggccaggctggtctccaactcctgacctcaagtgatccacccatctcagcttcccaagtgctggccttggggtataatttatcaccgtttttcctgagtttagttaaagttaagtaatgtgcatcaaagccttaaaaacacacgtcctttgatcagttaatttcacctttagaaatgtcacctaggtaagtgaatgagggtatgggtagatacctatgcaaaagcctgttcatcaaatttgtttagaataatgaaaagtgggaaatggcccagtagtaaggaactgagaagttaagggacctgtatgcccctacagtggaatattatagaatcataaataatgaaatggtaggccaggtgcagtggctcaagcctcaagaccgaggtgggaggatcacttgagctcaggagtttgagaccagcttgggcaacatggcgaaaccccatctctacaaaaaatacaaaaattaggcaggtatggtggtgtgcgcctgtagtcccaggtacttaagaggctgaggtgggaagatcacttgagcctggaaggttgaggctgcagtgagccaagattgcgccactgcactccagcctgggtgacagagtaagatcctgtatcaaaaaaaaaaaaaaaaaagaggaaagaaatgttagatgattgagatgattgttttgtttctggagaacgagtttaccagttcaccactgaccacatgtgtcaggtgccttggctggtggtaatggtaattcttttcttcctcgctttgctgaagacaaaagtcttcattatccagtgaaggagcttcccgaaggtgaagtgccaccctggtggaaggtgtttttgtccggtgtggcctgtggctcctccaggccctcctttcccccagccctgccccacgctctggaagccccgcctcagtccagagtgctcctggcaccccagcccgggcccaggcgagccagattgcagccggcacaggcaactcttcagagcctgctcatcgaggatttgacagtcgatgtgcgacttgtggtctgagcggggccctgcgtccccttgccactacttaagaaaataattaataataattaatgaataaactgggattattgagagccatttaccacaaaaggcctcagggtacactgcactcaagcataattaaaagtggcatcttttaaacttcgatttgaaatgaaaactggctcagttgtccagcgcagtctgggcctctctctgatcccaactttgcagatggggcctgagatgatgggaggaggtgcggaggttcgtcctgaggatgagggtacagccggaaagcatggggaggacctggaggagtgtggtcccaaagatcagagtgggccttcagtctgagagggctgctgcagccatggccaccagcagagagggaacaggatggcctggaagcaggtgaccatttgctaccgagggagaggatgaaatccctggtgccaaactcaggccacttggcccctgcgtgccagctgggtctaaagggaacaggtttcccctattaggcccaatgccctgtgctccttccctggccagggatggtcattcattcattcattcatcgagtttattgagaacctgctgcccgcaagcaccactctggagatacagctgtgtacaaaagaaggtgcctgctctcggggagcttataatgcagttggcagaagacagacaataaacaaatatttaatacatgccatagagaaaattatagcaagagggcaagggagtgtggaaggtgggaaggtagtcctgggtttccagggcgatctcatggagatgacatttgggcaggaagtgagggagtgagccaaaaggatgagcttccaggcagcaggaacagcctgtgcaaaggccctgaggcaggtgcaagatggaggaaagaggctagcatgggtggagcagagcagggaggggagagtgaggatcagacctgttctaagagttgctgaactccagtcctgtgggtggccctggacttgaaccttgagatacagtggtaaacatagccatcctcattctcaaagagctcagtgtctatggggagggccccacaatggagagacgcttagatggctggtggtgaggtatgtggctcccgggggcttctgattggccaggtgggagcactgccctgaaaaacttggccaggcgtggtggctcacacccataatcccagcactttgggaggccgaggcgggtggatcacctgaggtcaggaggtcgagaccagcctgaccaacatggagaaaccctgtctctactgaaaatacagaattagccggtttggtggcacatgcctgtaatcccagctacttgagaggctgaggcaggagaatcacttgacccgggaggcggaggttgcggtgtgctgaaatcatgccattgcactccagcctgggcaacaagagtgaaactccatctcaaaaaaaaaacaaaaaaaaacctgggcatcctgacttacacaagggcaggtggaacctggagagccctccctccgcatctcccacctctcaggagcccccaaggtgggcctaggaggcagcttcaccttagaggctatatcccactcatttcccatctctctcccaccggcttctctccctgctcccctggctatgtcagccttaccctcttcctgttgagacccccttagaaaccactgctgcccccaacccacaacatgaggctgagactcaccgttgactctggataatgattgggtccttccctcctcctgggagaaaggtgcacaggcccctcccggaggtgggctgccatcagccaagagcacgtggaccatctgcaggtgccctgctccatgtccctggctgggaaatcctgttcactggctcttgatctttctctaaaatgaggggacacttacccctttgtatcccaaacaaggctaacgaaagctccatgagggtgacatggtggaaccccaattcctgccaggagcgagagaggtagtaatcgggattagaagggtgtccacacctgtgagagcaatctcctggctgtccccgagggtccaggctgtgggctgcgaccaaacctttctgctccctctcatcagtcagcctgttccagagcccggaatagatgccatgtttgaggaatcccacctttcgggcaaggctggatgcagggcagggaacacctggatgtgaggtggcctggcactgggtaggaatacaggaaaagcaaagaaaaggcacggtggctcacgcctgtaatcccaacacttgggaggccaaggcgggcggatcacctgaggtcaggagttcgaaaccagcctggccaacatggtgaaatcccatctctactaaaaacaaacaagcaaacaaacattagccaggtgtggtggcacaggcctgtaatcccagctgcttgggaggctgaggcaggagaatcacttgaacccaggaggcagaggttgtagtgagccaagattgtaccactgcactccagcctgggcgacagagtgagactccatctcaaaaaaaaaaaaaaaaaaaaaaaaaaaaggaagacagaaaaagcaaagcctctttgaccaggttcctccctcttggtatcctgcaatttccattttatttcgatgaaagaaacaaagcccaggaagtagaggtgtcagccctaatttcagaagcttccaaacagctctcttggctgttgatatgtaggggtgaagcttcactgaaaatcagttgaccaaaggcagattaataggagaaacggcgttcacaatttattgtaatgtgcatagcacgggggaattgtagaatgatcacccagtaacttggtggcttacagatacttatatacctttttttaattttgagacagaggttcactcttgtcccccaggctggagtgcaatggtgtgatcttggctcactgcaacctctgcctcccggattcaagcgattctcctgcctcagcctcccaagtgtctgggattacaggcacctgctaccatgcctagctaattttttgtattttagtagagacagggttttgccatgttggccaggctggtctcaaactcctgacctcaggtgatccacccgccttggcctcccaaagtgctgggattataggcatgagctactgtgtccagcacagatacttatgtaccttttgtcataggggaagggaaggtgggaaaatggggatgatttcaagaaggatgttttaagaggataaatgatttttagggggattctgtgggcttagagaacatataatggcctgggacagagtctgttgggcccacagagcagtgtgtcaagtctgcctaggtgtgttgacagacagcagtctttcttcctgcaatatgagttggtaatgaaaactcagggaagtggctgggtgtggtggctcacccctataatcccagcactttgggaggccaaggcgggcagatcatttgaggtcaggtgtttgagaccagcctgaccaacatggtgaaaccctgtctctactaaaaatacaaaaataagccaggcgtggtggcgtgtgcctgtagtcccagctacttgggaggctgaggcaggagaattgcttggacctggggggcggaggttgcagtgagctgagatcacgtcactgcactccagtctgggcaaccgagtgagactctgtctcaaaaaaaacaaaaagacaaaaactcaaaagaaaagaaaagaaaagcctcagggaaggcaattgcatccttctttggcaggtctggtttccgggtagataaggaaacttcagagatcggcttcatcctgtgctctgagagagacagaggactgcgggggaggtcagagagaccttgaggccacctcatgtcaaagcgccatgttttggggtatcagttgctgggtcctggaaaggtctttgtttccacccacccatgtatccatccatccatccattaaaaagtaattattgcgtgcctatcctgagccaaatactgtgtttaagcccccaggacatggctctttgtcccctctgcccctggagagggatggctcacttgaacatttaatgctacagtggaattataattatgaaaaaccacacactgcaattcaggtttaggatgaaagtattaatttcctggttttaattattcaatagaaattaatgaaaattcaagaggaatctccaaggagcttcgctaactagcagaggtggggtggatcgaggagatgagagtggagtggagtaaagtggaagagagtggggtaagccagaggctgagggccctgcacctctgcccagcccaactcatctgggagctttcccagggccaaggcacgagcctgctgcatgaaccaagcctcaaccaagactcagggtttgctcattcatctgggggacttcggctgggctatgtgttgagctccatccctgctaggatgatgccagacagtggggagatgaagacccagccctgccctcagggagctcctgggtcattgcaggcagacagaccacacctgtagggcctgagctaagccctggagttctggcaacgcagagccgggctgctgggacgaggtgggaggtgaggacaggaaaggcttccctgagaagatgactggcagagttctgagggtctctccctcctgggtgaactgagaagccccctctgaacagacgcaaggtaacattttaaagtagtgaccatttggggcaggatgatttcccagcgtggtaatgtgtcatttgtcctcactttaaaagaatccgaattcagatctctctctcctctctcccctctctcccctctctcccctctctctcctctctctcctctctctcctctctctcctctctcccctctctcccctctctcccctctctctcctctctcatccacccctaagggctaggagggtggaagataaacttctgagggtgggacggctctgaggcttggagaatgggagacagtttcacaaaatgtcactaaatgttccccagaaaggaagaggattggagctttgagggcagatgattcggagggtgggggaacctgtgtcccagtcctaggaggctccctacaaggtgacaggtcctgaaaagggatggctggacaggccatgatgaccccaggagctctggcctcagaagccctggcaaggggtccccacacccaagctcagtgccaagaaggaagctttggatggaatgcaattgattcctgccttgtggccagttttgcatctatttgtaaattcatttccatgttcctgactgcctacttaggagtgccctttgaattctcctttgaacttggttgtagcaccttgcaggatccctcgtgaattaatgagttaaataaaaccatggacacgtgtttgttctatttgatgaagccatgatactcctttataaaaagtattctctagcaatgccttataatcctagtagtgagaactactacatgccctcatgctacgaggaggaacagaggcatagcgactttaagtagtttgcccaaggtcacacagctaggtggggtggggccaggatttggatgcagcaatctggttcaaagtccttaaagagcacttgagctctgttatctgtcagtcccccaagtaaccccacaaaataggtactttatttttagagacaggatctcactctgttgccctggctagagtacagtggcccaatcacagctcactgcagcttcaaccaggaggctgaggagctcaagtggccctcccacttcagcctcctcagtaactgggactacaggtgcacactactaggcccaactaatttttttactttttgtagagtcgggatcttgctatggtgcccaggctggcctcgaactcctgacctcaagcgatcctcctgccttggcctcccaaagtgctgggactacaggcatgagccaccccgccaggcaaaataggtacattatttatgctcaagaacagcagcacagaggttaagtaattcatcctccctcccacggtaagtggctatttctgtagtaggatcactgtacactctgtggtgggtttgatatctgcactcagggaagcgctgatagaatattaacaaaaattgtggctagcatctattgagcactttctctttttttttgagacggagtttcgctcgtcgcccaggccagagtgcaatggcgccatctcggctcactgccatctccctctcccaggttcaagcgattctcctgcctcagcctcctgagtagctgggattacaggcgtgcgccaccacgcccggctaattttttgtatttttagtagagacaagagttcaccattgctggccaggctggtctcgaactcctgacctcaggtgatctgcccgccttggcctcccaaagtgttgggattacaggcgtgagccaccgcgcctggcccctattgagcaattcctaagttccagatactgttgcaaaggctatacccagatcatctcatttactcctaagtccctacaaggaaggtaatttcattagcctatgttacagatagaaagactttgaggcacccagagggtgagcggcttgagtttttcttcatccctgggtttatctgaagctgagctctgccagcggacgtggcccgtagccgtctgccttaagaactggcctggactccccaaacaccacccttcctctcccgaggctccccagccccacttacaccctgaaggcggatcccttgactcccgagaggctggcggtggagtgcgcggcaggaccgcagggctgatctctccagctgggctgggctttggggacataggccttgaaaatctcctaattaccggtgggggcggagccgcgtctccagggtctcggggagggcgtcgggggtcggggattgcaggtgcccgcagccggcctcggctgtttaccaggcacccgttacgctaattgaaatgtgccaaatagctgcccggggcggggccgagcggagcagcgggctccgggtcacctgcggtgttgatgaggtattcaagaggaaaaagcgccggagcggcagcttcatttgcaagggaaatgacttgacgaggcccttcatttgcatctttcggcccagaggttctgattagctgcggaggaaaagcccgcctgttttatgcatgaggagctctgcctggagaccctcggctgctcacccgccccagccctgccttctcctcctaagtcggggaggaggagaggggtccccagagggcaggatccaaggctgaagcctaagaccaacccttggtggtgaaaatagaaatttcttgaggcaaggctgccataaagtgcagtgagactcatcggtgaggggggcactgtgcgatctccatccggggtcttcagggcaattgcatgagctcagcctgctaagagcctggcaggcagcgcgagctcccctggagttccggccgctccgcccagtggctctgtgcagcgcttcccgcccggagaacctagtgccccgttccagcccttcctggtgccccctctgcaccaagaccccctccctacctctttgctatctggcactgacttcctctgggagaggggaggcagtgggctagatgcttttgcaaatgttttctctacaatctccagtctttgtgacaattacccttaaaagttagacctcacatcctgttcctttcctgtcattcccacccacaccccctcccccttccctggactccgcgagtttttttttttttttttttaccaccacccctcaacccacattctccgcagctgcatctaccaggctggcagctctgtgagccagctgtaaacgtgattaatgctgaaggaagggctgctggctgcaaggacacatccctggctggggcacagcactgggtcaagtggccagctggggccaggcaggtgaaggattaatccggaatcttggccaacaatcaggtggctgtttttcccagacaatgggtctgaagggggcagtgcccaaggttcacctttgaaaactcccaagggtcgcaacccagtggcgttgggaacgccttggctaggggcctcttgagccttagcccaggctttggggcctggctgcaccttagggctattagatatgagttctaaacttattttcaaagaattaatatgtcactatgttcaattctttgccttctacttttaaacttaactttctcgtaaagcaaccttttttgattatgtcctccaccctgattcattctgatcacctgctccaccctgactcattctgatcacctgctccaccctgactcattcagattacctgctacctgctctgccctgactccagccaaagcactcaccccatcattctctttaaattagccagtcggaattagtttagcctgtgcggtctaaccctagccaataggggaacgacacagcagcaggggccacgtgcctcagggataagagcccccttcctctcctttgtccaagtgtgcgctcaccattgctccatctgtaagggcgcacccttctatagaagtaacttgccttgctaagaattaaaaaagaaaattttatattcgagtgctattccttctgcagcaccgaaatttaaacagggccatgccaggctgtggaggaggtagaagtcctgtcgctgtctatagggcacgctggcatgagcacatttcagacccagttcaagtccggctctgccgctgaccagctgggtggtttgggcaagttccttcaccgctgagcctcagttttcttatcaggagaatggggatgctagtccctatctttaagggttatggagaattggagctgatgtatttgaccatggtagtccttcagtacgcagtggctgtcactttactcttcatgataccgatgggcctggggaggtccccgaatgccgttgggacctcaaccccagctcttgacaccatttcgagaaggaattcaaggatgagtcagaaaacagtgaaagtatggagatttattgcaaagcgaaaagtacacactcaagaaaggggagtgtggcgttctcaagacaggatcgcacagtggggtttggggtttcatccttatgggtttctttagccaagggatgggatattcatgaaaattcctggaaaaaaggtggacgtttctcagaattgtggtgccactcatttttacaccaaatacgggtggtcttggaactgtcctggcgctggcaggtgtgtgatttaggatgttaatgagcatataacgaggtcctaggaggaacccggctcacatccagcaccttggtgggtcctgttggtctcagccagcttggtccacacaccctggttttcagggttttaccggcccataacctctagtcgtgtgaaattgttataggaaaggggtcccaatccagaccccaagaaagggttcttggatcttgtgcaagaaagaattcagggtaagtctgtagaataaagtgaaagcaagtttattacgaaagtaaaggaataatagaatggctactgtacagacgaggctgctggttgcccatttttatggttatttcttgattatatgttaaacaaggggtggattattcatgcctcccctttttagaccatacagggtaacttcctgatgttgctatggcgtttgtaaactgtcatggtgctggtgggagtgtagcagtgaggacgaccagaggtcactctcgttgccatcttggtttggtttcggctttggtgggcttctttactgcaaactgttttatcagcaaggtctttatgacctgtatcttgtgctgacctcttatctcacagcaggcctcagcctgtttttacccagcccctattcaagatggagttgctctggttccaacatttctgacaaaactgctgcctggaattttgtaattatcctgtaacccaccctgtgtttattcccgtctcattcgggtggtgttacctgcagcccaggggagggaatgccgtggaacagctctgccttaggctcagcttgaaggaagtctcagctccctcctcttccctacagctgtcagagcaggaggtggccccaggggaggctctagctgaggcccattaatggcatggaagagaggaaggggcaggatgcagccccatacctgccccaggctgggtcagatggctcccaaggctgcctctcttgggggaagcttctggaggaagcctggtgtgtgcagttttcctgtaacacaaatgtgggtgggggttttggaagcagccccacaggaacatctccccagctgcttggcaggtacttggctgatttcactttgagtgggcgggggttagaattctgcctccactttctacctgccatgtgatttggagcaaattccttaatttttatacatctcagttttaaattgtaaaatggggataaaaacaatgagaactaaaaaagacaaagcatgtaaaatacagaggctcgcgtgttacaagcgtccataaatgtccaattttatttgtgtcatgggagcctctatttcatggcaagccccaattcaatcttgaggcaaagcttctgttttgaaggctgtgcatatgagaatcttccaagctcccctccgccccctggccctgaaatgcaaatgtaatagactaaaaggaataaacccacaacacaaggacaggggtggggggtcaccaatccctgggagacagtggatggcaggcgttgcttgctacacaggtagagagtgctgcagctcaggatagaattgcagagagaggggcagtgaccagacagagcctccgagactcggggctcaggggcaagagattctgtagagcaacatttggttgctgagcataggggagtcactgacggtcgtttatgaaataactgcataagtagcggttcaccctctcccgccctctgtgcatttcactcagcgacaccctggaaggctcttcgctaaagaagaaaactgctggggaaagctaaggcctctgaaccgcaaggccgccaactatgagtgtgcacctgtgaagatgttgatgctccagagaaaatccctgcccatcccacatacaggcccccaccccagcctacacaggaggggatggagaggccaattgactccatagcagaggaaatgccaacctgccaccctcttacacgtgtccttccctcttacatgtgaatgagccatgaaggatccccaggcatttgaagaccatccatgcgaaggagaaaaagcaggaaagcaataaaaacactggcccagaggaagcagaaataattcacggaacagaagatagcatttaagccctctaatgaatatactcaggcagactgcagaatatattccatctataagagagctcagttttcttggaataagaaaaccccagagaaccatcaaagagctccggagatgaacaaatatgcttgctaaaatgaaaagttcaatagaaggactggaacatacacaatctcaaaatgcaaaagctaaaggaaacagagctggggaacccagaaagaagaggagcaggctctgtacagaaagaaaggagggcagactaggaccccattgcctaccagtaacactgggtgctagaagggaatgggtgcaggatggctgcatgttagaagggaaaattattttcaacctggaattatatatctagctacattatctgtcaaaaacctcatggcagaataaagacatttcaaacacgtaaagacacagattatcttcagcacacccacttaaacattttcccccagctttatcgaagtaccattgacaaatagaaattgtgtatatttaaggtgtacaatgtgatgatttgatatacatatacaaacacagcctttctttattttatttatttatttattttttgagacagagtcttgctctgccgcccaggctggagtgcagtggtgccatctcggctcactgcaagctccacctcccgggttcatgccattctcctgcctcagcctcctgagtagctgggactacaggcgcccgccaccacgcccggctaattttttgtatttttagtagagatggggtttcaccgtgttagccaggatggtctcgatctcctgaacttgggatccgcccgcctcagcctcccaaagtgctgggattgaaggcgtgagccactgcacccggctgcctttctttaaaagttgcttgacgatgttctccagagaaatcagggagtaaacaaagaaagaggaagatccaggaaactgaatccaacctagaagagagtcaagggaagttctgagatttgatctcaggcctagacagggtgaccaactcatcccagttggctgggactttttagtttcagtactgaaagtcatctcctggggaaccttgcagtcctgggcaaaccaaggtgatgggtgaccctagtgatggcagcagctgctccagatggcctggcgctgccatcatgctgggaggcatggctggggctgtacactctacagagcagggcctcctggtggggcggcagccacccaagttgtggcagcagatctgagcttccttgtgctcttggggggccaggagcaggcaggagccctgccctcccaggtgccactggagccacccaaactgcagcagcagactcaggcatctctgcactgctggggtcccaggaaggcacccctgccctcgcaggctcagaagtgcctgcccccactctctggctttctgctgtcaatgcctgctctgatcttggagaaaagtcaggctgagcccaggtgccatgaacagcagcaggaggcaggttcccggcagaagtgggcaggtccctggtgaggcatcaccttcaggccagggaggtcctgaaggctaggggccaggctgccagtcccactgactgaagtgggaactggtgccttttccgagcccacccatggctgcccatacacttcctcctctctgaggcccataaaagccccaggatcagccagagctgagcagatatatgacaggacagccggctgcagagaggagctaccctctctgttgagaacctcagagccctgcagagacatccaaatgacctacctgcagaggggagccacactttccaaggcctcctctctgctgattgctgaacacttgatgggacaacctgcctacagagatgacctactgttgcgggtcttactgagctgttgtaacactcaataaagctcctcttcgtcttgctcatccttcacttgtctgtgtacctcattcttcctggacacaggacaagaactcaggcaaaggtgccactggccacagaggtttctgggaaaaaaattgacacaccaaggatcctgtaaccctaggcctagagaccaaccagtgaaaattgtagcaagaagagtagactctaaaagggaggttgcctagggaaaaaggaatgccatggaatttatagtatgatggagatatgattaaagtacataatacaaaaaaggcaattagaaactctaggaaaaataaacaattatatgagaaaatgatgacccaactcaaaaaatattaaatgtgacatgattgtaagctattgattcagtgtgagaaaagagaatctattggtccttgatgttagaaataatctatgagtgatccaaggttggacattggacccaaagtgaatattttcgtatactgcttgatccaacagcaaaaaatatttgcgcggacataaaaatacgaacatcttattcttttcaacttttagaatcaagctatggataacacagagaagacgtggttgaagttcagggacagatggtaagtgtggagaactttgacaatgtaaaaatcaaaatggtcatcaggagtggaaagaattgctgggaaaagagatgaattacaaagagatactgtcaaaagttgatgccacataaaatagagattcatctactagagttaaaaggtatacagtgcaacccaaataacaaccaccatcaaactaggagaggcggagggggaagagaaggaagtgagctgaatcttcatgtttcacagtgggaatccaatggcttttggttaaagttgaaaaatcaagaaatagtaatatttgtacattatctagactttcagagacaaccaccagaaagagggcaattagaagtggttagactgcagtctaaccctccaggatacctccagggggtgaaccagggaaggaaggaaggataagacaggaggctgttgttttttattataagctctctgtaccttttgattttttcaacaggcatatgttatcttcataaaggctgaaataaaagcaaacaaaattaaaacagacacagatcttgggaatttaccaccctctggctggctccctgtaaagaattgggctgtaatgaaggctgcacttaggcaagctttgagggacaagaagaagcaagatggtgccctgggaggccctggttcaaccttcctatcccacggcatggaggtcatgggggaagaaacagaggcttgaagagtgtatcattttcctccaggttctctgtgctgagtagtaagtgtgttccatcaatgtcctcgtattagtctgcttgggctgtcataaccaaataatatagatggggtggcttacacaaaagaaatgcattttatcatgctattctagaggctagaaattgggggtcagggtgccagcatgtttgggttctggtgagagctccctccctggctcacagaaggtcaccttcttgctgtgtcctcccatggcagaaggagagagagagaaaaagagagacagagagagaatctcctcttcttataaagccccagttccatgagggccccacctttacgacctcatttaaacttacctgcctcttaaagaccctatctccagatatagtcacatagaaggggaaggggagttcgggcttcagcatatgaattttaggggaacacagttgaggccacaacagccctgaatgctgactaagaggttgaggagaggggatgaagattttctctccagtctctgttttcattccattgggtttaacaactgtattagtctgtttttgttgctataaaagaatacctgacaccgagtgatttataaagaaaagagattttgctggctcacagttatgcaagctatacaggaagcatggtgccagcatctgcttctggtgaggtctctggaagcttccagtcatggtggaaggcaaaggggtagcagatgcatcacatggagagagcagaagtgaagggggcggagaagtcaggctcctttaaacaaccagctcttggtgaactcattaccactcattaccgtggggagggcactaagccattcatgagggatcacccccatgacccagacacctcccactaggccccacctccaatattggaggtcatattttgacatgaggtttggagggaacaaaacacccaaaccatatcaacagcaaaacctatggccgcttcaagttatagccactccttccagggaagagaataatcaaatcttaagaaagccctgcacttacttccatatgactgtttccccagtaattgtcctcacacctgcgtgtcttgttaggaccagtgcaggtgttaggacacacctgcagtccttgttaggacccttcaaagccctctagaactaggtgtggtggctcatgcctgtagtcccagctatttgggaggctgaagcgggaggatcgcttgagcccaggagtttgagtccagcctgggcaagatagtgagactctcattttaaacaaacaaaaacaaataaaaagtcttcttgaagctcctgcaatccagtgatagacaaagcatcgagtaactcctgtactctaggttatttccatctcaaattatgttgagctacattggaaactgatatggtttggctctgtgtccccacccaaacctcatcttgtagctcccacaattcccatgtgttgtggaagggacccagtgggagatgattgaatcatgggggcgggtgtttcctatgctgttctcatgatagtaaatgagtctcatgagatctgatggtttttaaaatgggagtttccctgcacaaatgctctctgcctgctgccatccatgtaagatgtgcctttgctcctcctttgccttccactatgattgtgagtcttccccagccatgtgggactgtaagtccattaaacctctttcttttgtaaattgcccagtctgggtatgtctttatcagcagcatgagaacagactaatacagacacctaggtcattaaggaggggtttaccctgcacagcatgagatcagaaagcccagatacccagtgtccaaagtgtggatacaaacacctttccctgaccaagtttccgccaagaattagaatgccaaacaaaatcatcctctccttatggaagttaaattcccaaagcaacaagttccaaacacctgtgttccttctttagccattagagcccaagctgcctttcactagaaccagatttggtttccatgataaaccaatttcaaatgtctccagtgtaacacttccccgaagttctaacgagtccctgagatggccccatggatttgtgctcctgcttcatttgggacctttgaggacttccttcactttcttctgagttcacctttgtatgccaaagagtgtttaaaatgttttacctgcagttttaggtgtggttgagagggcggtttttcaggataactcatcatcctgaaacagctgttacccctccccaaaatttatcctaagaaaagcagcgtccccacataggccttgccacccatatcacctgtaggaaggagacagaaagtaaacatagaagagagaaaacatttgtggtttcagtttgctaggatgcaaatacgtcctgccagttgtctggagtccatagattgtgtgaccttgaacataagtaggagaatcctcttgggaaaaggctgaggcttctcctgggcttctccctcaaactctgcagaacctggaactttgttagtcctttgccactgtcattggctctgctcagactggactgactgattgatgcagggtacagaggcctggccttctcaccccaacccaagcagttcagaagggttgtctgatttttttcagcatgtccgtagggtaggctgaggtctctgttgacactgcagtgccagcttaacttctctttttgctcagttctgctgctttcctttccctctcaaagctattggtccaagagtgctccctataagcctcttacatgctaatctccatctcagactcctgcactcaaaggaagatgggcaatgtgaaaataaacctatagaacaagcttgtccaacctgtggcccatgggacacatgtggcccaggatggtttgaatgcagcccaacacaaatctgtaaactttcttaaaacatgagattttttttaaaacatactttttaataaatgaaattttaaaatagaaacagggtctcactatggtgcccaggctggtctcaaactccagggatcaagtgatcttccctcctcagcctctcaaagtgctaggattaccggcatgagccaccacacctgacacattgtgagattactttgtaatttttttttttttgagatggagtctcactccgtcacccaggctggagtgcagtggcgcgatcttggctcgccacaacctctgcctcctgggttcaagcgatcctcctgcctcagcctcctgagtagctgagattataggtgcccgccaccaagcccactaattttttgtatttttagtagagacagggtttcaccacgttggccaagctggtctcaaactcctgacctcaggtgatccacccacctcggccccccaaagtgctgggattacaggcatgagccagcgtgcttgagcctgagaggtcaaggatggagtgagctatgattgcaccattgtactccagcctgggcaacagagcaagaccctgtctctaaaaaaaaaaaaagtcattatatcaacaaatggttgaacaattaattgctcattaatatgccaaaggatgagcctagagccatatcttctgccatatacaaaaataactgaagctggatcatagacctacatggaaaacctaaaactatgaaacttctagaagaaaacaggagaaaattttagtggccttaggtcaggaaaagatttcttagataaggtataaaaagcataaaccataagagaaaaaattggacttcaactttttttctgttttttttttttttttttttgagacagagtcttgctctgttgccaggctggagtgcagtggcatgatcttggctcactgcaacctccacctcctgggttcaagtaattctcctgcctcagcctcccgagtagctgggattacaggtgccagtaggtgggattacagatcatccatccacaagggtcacgtgcccacgtggtaacagcccacgggagctgggtaatggctgcccctagagaagggtcacatgctctccagtctgccacaggctccgccatgccttatggttctccccacccactcccatcacctacatggccctgtagctgggtgtctgcagccagagtttagtggtttctccaggcctttccagcactcatcttttctttctttctttctttttttcgagatggagtttttgctctattgcccaggctggagtgcagtagcgccatcttggcgcactgcaacctctgcctcctgggttcaagcaattctcctgcctcggcctcccgagtagctgggattacacacgcaccaccatgcctggctaatttttgtatttttagtagagacggggtttcaccatgttggccaggctgctctctaactcctgacctcaggtgatctacccacctcggtctcccaaagtgctgggattataggcatgagccactgcacctggccaagtactcaccttttctgtggctaatcacagcacttgagagggatgggaagacagccctattaggctcatcttattcacatttgtaaatctggccagctgagcccctggtctagacttcagctgtgtagaggtctctgctggggcctgtccaggagcctggaaccccagccataagagtcactctttggagccatctggggactcgtgcccctcgaatggattaaagccatgtctcctgggaaaggcaagatgccatttaggaaacactggcagggagtgcggtgccttgactagccccacatacgttttctccagctgagagccagcccctaaaagagtggatccctggccaggtgcagtggctcaagcctgtaatcctagcactttgggaggctggggtggggggaggggggattatcgtttgaaagagagtaaagcgtagccttgaaatttatctgcggggatgcgaatgggaaaataaagtattctggagctggagaggggctttttttgcccgctggcagactggggagagaattcagaaagcgaaatggggaaactgcctacaaccaaaggctgctttcccaccagccctgagctcctccagatctgagttgcgtcagcccacagcctgcccacccctgccatggcaaggttcttctcggtgccaggcagtttcacatccacgagccctgctctgcccaggccatgcttggtaccttatagcagctttctcagtgactcctaaaacagccttttaatccccattttagggatgtggaaactgaggcttagagaagtaaagaaggtgatgaatttgggataaaggtccgtcaatgtctggatgttttccatctcatgacgcagtcccatgacaatactaccccacccacaccccagttcagacaagaccctcgccaggagcggggaggcagccagccgcctcctaaccagctcctgtagcatcaaatccctgatccctgatcccgttgccatagaaacagctttagacctcacagtctctcctgggctcagtagggaggtactggagggaataatccactatttgctagcaaattgggggaattgtggctcatgcttgacagagaggcagccgaaggtgggagggaggatggagaagggcagcttggtgtcatttgagcatctgtcccctgttctgggagatcctgcatctgcagggagaggccctaggctgactccctggggtcaccaggccgaggtgcacaccctccttggatcagcatccacgaacagctcttcctctgccaggcgctattctggagatgcagaagtggacacatccgagaaggatcctgccttcaaggagcctacattctggcaggggaagcagacagtggacagtagacagtgcatgcatgataaatagtgtgaaagatgctatggaaaaagaaaccagcagccccggaaactggtgatcagagaaacaggggtttgcaattttaagcaatgcagcaccgtcttcaaatgcaggtcgcaggcacccacaaacagagccccacccgcccatttccaggctgacatgggacccagaagcatgcttgttttgtgcagaggcaagacgcaggaaagtcacagactctgaggggaggtggcagtccccctacccacccacccagactcgcacagccagaatcccaccacgagtgcccaggcttggcttttgggggtttcctttgtttaaaccccacctgttctcatccaagcatcctgggaggttctgctcagagaacacttgtgggtagatgaacagctccctggggacagacataaaaccttggggagtcagacaaacccattgccatgaaaagagctgtacagcttaccggggaaggggcatcgccttcctcacatgaccccacccagggggtggaggcctttgccagtggctgcttttgcatgtctgaggtggaacagggacagcactttgttttcccaacaacaaagctgctcacctaactgcccctccttgtaccgtcagtcctaactgccagcccacgcagccctgcatcagcctgtggccgcctcctcgtgtcaccttggcctgcacagcctctggagcgcacctccctggaggcagcacgtgcctgccccacactctggggcatcctcagccctgctgggccacagcaaggctcccaaacccaccccgctcccctcccacttagcagatgacccgaggaccctgcttcctggggaagagcagaggcttccaggcttgcttcccttggcttcctgtgcaccgccccagccctgcacccgctgccctcctcccttctcctccagcctggaaggggctgctgaggcatagctccccacgtggacctttgacctatgcaccctcccgcccctggctgtggggttcgtagaggccctgggccaagtcttccccttaggcggtcaaggtgctcacatcacctctccacagacagtcagagacagcagcttcctttccactctctaatcctccttagagccctgctcacacctcctcgcaaccggggagagatttcaccttgaacttgacaattaatgacatttcagtctcagctggcttgtgtcatctcttaccaattctgactggtgtctgactagaggcaacgtgggaccctggattagatcctgcaacagaaaaaaagactttagaggagaaactggtgggattctaacaaagtctgtagtttagttaacagtctggtaccagtgcccatttcttagttttgacagatgtatgcaccccggttaggtaggatgttaaaatcgggggaagctgagtgaaatggagatgggagtggtaattactttgcattttcagcaaatctaaaattattcaaaaataaaaatttatttttaaaaaaatgatgagtctgggtaaatgatacacgggagttttttggtactgttcttccaactttttaaaataagtttgaaaatatttccaaattaaagttcctggatggatgcagtgggtcatgtctgtaatctcagcactttggaaggccgaggcaggcagatcacttgaggtcaggagttggagaccagcctggccaacatggcaaaaccctgtctctactcaaaaaaaatacaaaaattacccaggtgttggtggtgcacgcctgtaatcccagctactcgggagactgaagcaggagagttgcttgaacctgggaggcagaggttgcagtaagctgagattgcgccactgcactccagcatggaggacagagcgagactccatctaaaaaaaaaaaaaaatagttccttcaaactttatagcagcattgtttgcaatcgctaaaaagtggaagcaacccaggtgtctatctatggatgaacggataaacaaaatgtggcttttccataccatgaaacattatcagccttacaaaagaaggatttttttttttttttgaggcagagtctcactctgttgcccaggctggagtgcagtggcatgatctcagctcactgcagcctccctctgcctcccaggttcaagcaattctcctgcctcagtgtcccaggcagctgggattacaggcgcatgccaccacgcccagctaatttttgtatttttagtggaggtggggtttcaccacgttggccaggctggtcttgaactcctaacctcaggtgatctgcccgcctcagcctcccaaagtgctgagattacagatgtgagccaccgcgcctggcctgagaattttttttttcttgttttcttttcttttctttcttttttttttttatttgagacggttttgctctgtcacccaggctggagtgcagtggcaccgtcatggctcactgtaacctcaacctcctaggctcaagtgatcctcccacctcagcctcctgactagcaaggactacaagtgcgagccaccacacgctgctaattttttattttttgtagagatgggggggtctcatcatgttgcccaggctggtcttgaactcctggcttcaagcgatcctcccgcctcagcctccccaagcgctgggattacaggcatgagccactgagcctggccaaggaaggaatttttttttcttttttttctttttttgtttttgagacagtttccctctgtcacccaggctggagtgcaatggcacaatcttggctcactgcaacctctgcctctcaagctcaagtgattctcgtgcctcagcctcctgagtagctgggattacaggcatgtgccaccacacccggctaatttttgtatttttagtagatacggggtttcaccatgttggccaggctggtctcaaactgatccatccacctgcctcgaagtgatccatccgcctgcctcggcctcccaaagtgctgggattacaggcctgagccaccatgcctggcaccaaggaaggaatttttgatacaggccataacaccggagaaccttggagacattatgttaaataaattaagctggtcacaaaaggacaaatactatataattccacttatatgagattcttagaatagttaaaattagagacagacagtagaatggtggttgccaggagctggagggagggggagtggggagtgatttaatggggacagagtttcagttttgcgagataaagggtcctggagatgggctgcatcgcaacgtgaatgtacttaactctactgaagggtacacttaaaaatggttaagatggtggttttatgttatgtgttttttgccacaattgaaaaaaaagaaaacaacctggcagggtgcggtgattgacccctgtaatcccctgtaattccagcactttggaaggccgaggtgggtagatcacctgaggtcaggagttcgagaccagccaggccaatatggtgagacctcgtctctactaaaaatacaaaaattagccaggcatggtggtgggtgcctgtggtcccagctgcttgggaggctgaggcaggagaattgcttgaacccgggaggcagaggttgcagtgagccgagatcgagtcagtgcactccagcctgggtgacggagtgagactctgtctcaaagacagaaaaaaaaaaaaaatcaataaagttcctagaaaataattccctctgagtatacaaaagactgtagggcctttgtggccccagaccctcaccctcaaggtgaggcctagtcagacagggccctctccagtgtggggcccaagcagggcctgggtgcaaggacgctcctggtcatggtgtctcccctggtcactggactagaccttccatcctgctcggctcccagcaggcagagccctttactgccccctcccctggcccaaggccctagaagtggggagaaggccatgtggaagctgaaacaactctgagaatccagctcacagcctgctgcaagtcccagggatgcttccaggccccgctgctgagccgttcctccatctgcagtgtatcacgacgtcccccgcccctccgctgtctgctgccagctgagaggttactagagcctgggctccctctgatacttccccagcctgttgtaggctggcggccagagagcttcctgggagcccagtggttgacagctctcctgccccaaagccttccaggaccatgggcaggggacaaagagggctgggggcttccctggggaagtgatgcacatcaatctgctcctgagcctgccccaaggagccagtggcggttcttttgctggattccctgaaagacagccattactattgttgttgttagcattgagcgtccccagataaatgagagccctgttaggacagaattctgaagcaaggaagggctgcctatctggtctctgtctctgagcatcagaagctgggctttgggattctgtctggggccccaggttcagacacatccccatcccttaccttgaggcttgacgagggccaaagagtttgttgagactgcttcgtccaaaccctgggagggaattcacaggcagcatttattctgcccttttctatctactgaccacaacttagaggactctagtacctctaattcctttgcacagaagcccccatgataacccttccccagcagtctaaggagaatgtccggtctgccagcttctcttcccagggatggcagttccaggggacgtggccatctccaccccatgagtcctcttaatgcaccctcctgactgggagggcagaccccacccctgctgctgccagaatgacagagcccctgaggccaggctagagtcactcatgggaatcaagacttcaggccactacaaactgcctgagatgacgggccagcccgcaggagtccacgtggggccactctctgatgaaggaagatggagggagccagggctggggaaaagggcttcgcctgcatccttggcaaagaatctctgttgtgggcacccaggggctgctgagagcactcaccaggtgggactccctcgaaacagtctgcccgttgttccccgaacgcttggcaaagtgcgcacactgatgtgtgtgtgttcctccacgtagccccagcaggggaagtgtgtgtgggcctggggcgctcatgcacacaggctgggcaggtgcgtgagcatgcacacatgtgggtgcccacaggctgcaagtgctgcccggagatgctgcccggaatggctgccactcttcagttgctggtcccccacatcaggtcacactcgcactcagccctgtgtctcagaaacctcagagacaaactcccacccacattcgctcaaagaccccagcccaaattaggagtgacatctctgccctgagctcagcggtgtctgcaccacacgctcagatagagggcctgggagtccccacccctctccagagaggattctgaacttgtgtgtgtgctgatttttggtatgtgctcaactttgacacacactcacagctaaattgccagaaaaggctttttcttgaatagttttttgttgttgttgttgttttgttttgttttttttagacagggtctcactccatcacccaggctggagggcagtgcggcgatcagggttcattcactgcagcctcaaacttgaactcctgggctcaagcatctgcccccacctcttgttaaagaagccgcaggcaagcttttgcaaacagccaagacttccctactgaggtagagaaagaggcccacagcccaccttgtcacagtcggtgggggaggtagcgatggggaggagagggcctctgcagtgaccaggtagttggaggacagtgtccgagtacccgaggggcaatagcaactgggatccccggatgtagaggagcaatttaattcctgctggagcagctgtacagagaagtcaagttcatcttggggaaggcaggggaaaagaaaactcagggaaaaactctctattttctgagccaaaaatggtggccctggattcccttcttcaacttgagaatgcatttaggtaaaaaaggtgacaagaggctgggcgcggtggctcacgtctgtaatcctagcattttgggaggccgaggcggggggatcacctgaggtcaggagttcgagaccagcctggccaacatggcaaacccccgtctctactaaaaatacaaaacttagccagacttggtggcgcgtgcccgtaatcccagctacttgagaggctgaggcaggagaatcgcttgaacccaggaggcggaggtagcagtgagctgggatcacgccgttgcattccagcctgggcaacaagagcgaggctccatctcaagaaaaagaaaaagatgacaagagccaggtctgcaccatgtggcctgcctcattgcagctcatcccagcctggggcttcagctatccctgattcctcggcaggcgcaagattcctcctaataacgagaactccccctcccgctgccatgactgaggcaaccacagtgcatcccgggagcgtcacccaaacagccgtaaacatgaagtcactttctgttacgcattgaacaactctcctttattaaacagaataaaatcgcatgagcacaaatagaatctcctgcaaaaatatttatctgttaatataatagctgaaatcgccagggtttaggaaactgggaagaatgacgtctgttttgctgtgggcgctgcctcagagccgctgtctgatgggtaacatgcaaacggcttcttcctccaccctccaaaatatgatcttcagaggccaggttggctttacccagtgcagtagaggggtccctaaaattggagcgtgaaccctgattttgtaagttgaattccatttccactgccccaggggtgctcgctatttaaaagggaaattttagctgtggcaaaaaaaaaaaaaaaaagaaatcattataatgcaagtcagctttctcttttatcccttcttggtaaatttgattttcaatttttctctgtgcttggggctgggaagagtggaatccaagcatgagaaaaatcaatgggaagttccaggaagctatggcccagccgaatgctccagggttccagacagtacctcaggggactttggagcactcggccctatttgcacttctgcggggctttgctatgccttaagccctcaggtcaagggaaccactggctacttggtagaagcttgtggggtgaccccaggttacctgtgtgaggtttagcagagcctaggggctcgcctcttcctgtcctcactgtccttgagacccttacgtgccacctggaccagcttgctcctaccaattcctcccctgcactgtctcagagcctgttatcctaaaatacagctgtcccttaaagctggggaccacccttccacctaagcaagtgggacccctgccctgagccccaggctgcagaaggccacgctctggccacccctgggacacccttcctccagggcagggagtcaccatgatttgggccacacatcacagatgaaggacaggagactgcgctcccttcagctgcaaggtcggggtccccagtcacctcacttctgatcagctggctgtacattcaggggtttctgttaccccctaagttccaacccactagaatgcttacagaactcaggaaactattcaatttaggatttcagttttattttaacaaaggatacaaatcaaccagccacagggtaaggtgtgtggggtggagtctcggagggttccacctgcaaagcttccattgtgctcaggacccgtgacctcctgccacacggatgtgtgatgagacgccggacatcgccatcatttctcctcccccttcccctttgagccgccacatgctgagattgggccacctggatagtccaggacactctccacatctcagcgtcacaacttagccccatctacaaagtcccttttgccatgtaggtaatatggtcacaggttccagggcctaggacatgagcacctttgggggccatgattctgcagccacaccctgtgactggcgcggaggcctttcctgactctggagggaatttgattccagttttttggagtctgtggagggcgtggccacgcataaggcatgctggagggctgagccccaagctccgggacttggcctggatggggctacataccttgaagtgggaggttgagagctgacatggtttgggtctgtgtccccacccaaatctcatgttcaattgtaatcaccagtgttggagatggagcctggtgggaggtgactggatcatgagggcagcttctcatgaatggtttagcaccattgcctggatgctgtcctcaggacagtgagagtgagctctcctgagatctgcttgtttaaaagtgtgtagcaggctgggtgcagtggctcacgtctgtaatcccagtactttaggaggctgaggcaggtagatcacctgaggtcaggagttagagaccagcctggccaacatggctaaatcctgtctctactaaaaatataaaaaattagccaggcttggtggcacacgcctgtaatcccagctacttgggaggctgaggcaggagaatcgcttgaacccaggaggcagaggttgcagtgagcagagatcgagccattgcactccagcctgggcgacagagcaagactctatctcaaaataaataaataaataataataaaagtgtgtagcaccttcctggcccagctcctgctttccctatgtgaggcgtcgactcctccttcgccttccaccatgattgtttcctgaggcctctccagaagccgagcagaggccagcgccatgcttcatgtacagcctgcagaaccgtgagccaattaaacctcctttctttatgaattacccagtctcaaggcgttttttttttttttttttttttgttttttttttttgagacggagtctcgctgtcgcccaggctggagtgcagtggcgcaatctcggctcactgcaggctccgccccctggggttcacgccattctcctgcctcagcctcccgagtagctgggactacaggcgcccgctaccacgcccggctaattttttgtatttttagtagagacggggtttcaccgtgttagccaggatggtctcgatctcctgacctcgtgatccgcccgcctcggcctcccaaagtgctgggattacaggcgtgagccaccgcgcccggccggcgttttttaatagcaatgtgagaacagaggaatacaagggctttttgcattctgtaaccacagccctgcgtcagtggaggtgggcagggagaaggcaggcagggctggctatacacagctggttggtctaactctccggctcggctctggggtggccaggaagggacccatcatggggcagctccctgccttctcccaagtctgttcttgcccttagccaggagcaggtcctatgaggattggaaatgtggagacagcgtggccctggagccctagttcacgccctggccatcagagctgcttctgctcaaggcattgcttcttgttttcgcccccattcgttgcacctttgctgcacaagacattttgcacatatgaccaagcaagggttcaggccctcatctttgattccaaagcttgtttttcactgcatccaagaccctctgcagttcccaaggccgccctgtacagttgtgcaggttttcactacacaagagcaaaaggccaaatgctgagcggggctgaaatccagcctgggctccatgcacccaactgggagcccacacacaggcttcaatcacccagaggggagcctttctcagctttgcccaaaggtaccatatgatagccaccttgacagcttccattttagaaatgaagaaacacagagaggttaagtaacatgtctaaaatcacacagctggtcagtgatcttgggatccaagcctggtctttgcattctatagcattgcctaaagcaaggttctgctgagcaaaagacctcaacagatgcggtgtttaaagggaaatgtccagagaccggggactctgctgggtagagcatcagcaacataacacggtgggaaccacaagcttagacatcaaagatgaggtcgaagccttgctcagtcacctcttggctgtataacttgcacagataattcacttctctgagccttgatttctccaccggtgaaatggaaagacttagcttgaatcccaatgaccactgaccagctgtgtgatcttatatatgttacttaacctctctgagtttcttcctgtctaaagcggaggctactggggtggctgttggctttatgtggtacctttgggtaaatctgaaaaaggtccccctctgggcagtggcagtcctagcccatagaactgttgtgaagattaagaaaacgctgcggtgcctgtttatatttatatttttctggctgaagaccaatttctccagcgttgagggttaattgagtgcatggctctggtctgcctgggaaagtgccagaaaagaaagaaaggccaagttggaactggggccagggaggtggccctgttgctgcccctcccatctcttgtccaaggcataccatgctccctggtctctgccggtctcagctctgcaggtggaggagaggctgtaggctttgtattgaaccaagcatgggggctcctatggaaggttttacagatgagaggagcaatcgctggctccccaggttcttctctggtatagcatcttaggggaagggattcccagtcttcctgggcttctccttccagctcttcagagtctcgctctgtagcccaggctagagtgcagcggtgcaatctcggctcactgcaacctccacctcccaggtcctggttcaagcaattctcctgcctcagcctcccagtgctgggattacaggtgtgagccactgtgcccggcctctccttccatctcttagcacaacctcaggcaaggttttcctgagctctaaccctacacccccctgactttccttcatccttagataaaatgaaagtcaacattaagttttgcaagactggggactgggtgaggtggtacatgcctgtaatcccagcactttgggaggctgaggcaggaggatcacttgagcccaggagtttgagaccagcttgggcaacaacggcaagacaccatctctataagtaatttttttttttaaacccaggcttggtggtgcacacttgtagttccagctacttgagaagctgaggtgggaggatcacctgagcctagaagatcaaggctgaggtgaaccacgattgcgccgctgcactctagcctgagcaacagagtgaggccttgtctcaaaaacagaaaaaaagttttgcaagactgtgaaggcagacaggtggatactgagaaatccctcagaggcctcccaccccaccctcccccagggccttgccctgggaagctgttttctttaccaggcatctccggatttgtcctttggggttgatggagatttatttatttaaacacacagctgacacttgtgcctcttgttttcggagagtcggggacaggatataaacatatttggaaagaagccggagcaggggacattgacgaaccaggggcctcggaggttctggataattctcttattctggtccagtgctgaccacacaggtttatttttcccttgctcagagatgatgggaggagaatcagagaaacaatggtcatgccgacctcaggcttcctgtgagggtcaggacatccatcattgttcctctacaaattaatagactggcccatccctggttgctacggcaactgcccccagtgcttttgtgatcgtaaaatggaattcactggaagtccttttcaagtgaactcttctccagacaaacggattgaggaaggaaattaccagaaggcccagcacctctgaacaggtctttgtttccaggagatgggcctgatgagaggctgagaagccactaccgaagccactaccggaaaggacactattaattacagggtattccagaagttgccctggccacaggggaggagcaggctctgtggtttccacacatagttcccagcactgcaattaacccagagccttccagaaatgtcaaagacaatgaggttttatttttctccttttctcccactatcttgggctccttacttcaaattgcctttgccctgttctgatctctgtgaaggatgccacatgcaggggaaaaaaattccagctcaaaagcagaaaatcccagagtccccacaccagaggccaccttgaggggttctgggggaagcctccctgagcaggccggacggtcgaccagctttgcctgtttcataccaagactccagaattcagttgcaaaggaaaactccctatcctgagtgccttcctttttatacaaaaaacaaaaacagaggccgggcgtggtggctcatgcctgtaatcccagcactttgggagaccaagatgggtggatcacttcgggccaggagttcgagaccagcctggccaacatggcgaaaccccatctctaccaaaaatacaaaaattagccgggcgtggtccacatgcctgtaatcccagctactcagaaggctgaagtagaactgtttgaacctgggaggtggaggttgcagtgagctgagatcgcgccaccgcactccagcctgagtgacagagcaagactctgcctcaaaaaagaattaaaaaataaaaataaaaataataaaacaaaaacacccagcatttcctcccaattatataagtcattcacatccacagtagaaaaatgagaaaatagagaaaaccacacagaataagataaagccaattacaatcccgtccgcaccccaaatacccaccgctagcatttggctgtaaacctttccagtcctgtctctctgggtaactgccttgttggctcctgacgtcattgctttttctcccctgccctttcatgtgtcgatgggaggaggtccattgtccctcacccctggatgcaaacattagcaaatgcatggccccagctccttctcttaggtaatagctcgtggccacgctgggttgcaaacacagtcttaatttggtcttcagaatattcagcttgtggaagatcagaaatgtgccgccccaaaatgtgcaccttttggcatcaggctgttgagctgcgggcagttaagaagaagcaggtgcaggaagctctgcactccctctgtttgcctaaaagcaggacatagatttgtagagacagaagctgtcccactcccctttctaccacggagcaaagctgagccactgaagacacctttgcacccttgtgggcctgaggccagctccagaggcatccacaagaacaggtttccccagccagcctgcacccgccagctctgtgcctctccagggggctgcacccaaagtcctttccctttgtcttgtgacttctccaaagatgtactgttctctgtggaagatgcaacatgatctgggattcaaagccatctctttgagaaccaggcattccctgggtgcttcctgtgcacataggcaacgtgtatgctggctgggcctaatcccagcactttgggaggccgaggtgggcggatcacttgaggtcaggagttcgagaccagcctggccaacatggcaaaaccccgtccctactaaaaatacaaaaattagctgggtgtggtggcgcacgcctgtaatcccagctactcaggaggctgaggtaggagaattgcttgaacctgggaggcagaggttgcagtgagctgagatcctgccactgcactccagcctgggcaacagagcgagactccatatcaaaaaaaaaaaaaaaagaaagaaaaagaaagaaagaaagaaaagaaaaaggcagcatgcatgctgatgcacgtctgcctttctcttgttaatctgtctttttgttccaggaggctgttccagctgagaacttatgagtattgtaggaacaaatgagttttccacccctacaagcccatgatatttaatcatatctctcaagggaactaggggttgaatcttctcccttccccagctcagcctgctccagtccagaggctgcaatgggaaggggatggggcggatgatctgccccagccctggcagagagagggggttggggggaaggaggtgggaacctgctagggtggtcctcactcgcctggacagcttcccctcttggcttccaagggctcctggaaggttccctgctgggctctgggtccctgtgaccctgggggatgctcctcaaatcctgagtagtcccatgtgacgtccagcagaagcccccccgagcatccttctgggcactgccccatccccttccagacggccccactggtagggtccttgggtagccccttgtgattctctctctggtctgcaaggaacactcccatctccttgccctgacacacaaacctgggcctgtagggctcccgctccaccacccgaatggccacagccatttcctcaccatggagatgtttctgggggaggcagacccctggccccctcactcacgcatttccaggctgggccaggtgtccatgctttgcatttctctgctgcaggagacacatttcaaggctctctgcagggggtcccatgagttctcctgatgcagagacagagcggggacccgcctaggggcctgcccgcacccaccccccaaccacagcatggaaataaaggaaaagtcttgagttccttcaggagaaattccaggcactagctagccttggagaataaatgagcagccggataagcaggaagatagcaacaaacaagatgagagcaacaggagcctcccaagcaagccagaggaacaaggtgttttggttcctacagaaactaaagataacatcttcacatatgttctcgagttgtttttcagaaacccccactgccagcctctatcctatagacctcagatgtggggaaccgagggcggcactctgactgccgttctttgttcagaatttcatcctgagaggcctggagaatcatgcccatggccacactgaggtacagcctccatgtatgggtttacaactttacctgcaatgcacccctcgctttcctgaaatgcatccctgcctttaaaaacccttgcctgtgctcacgcctgtaatcctggcactttgggaggctaaggtgggcagatcacttgaggtcaggggttcaagacccacctggccaacatggtgaaaccccgtctctactaaaaaatacaaaattagccaggcgtggtggcaggtgcctgtaaccccagctactcgggaggctgaggcaggagaatcgctcgaacccaggaggcggaggttgcagtgagccgagatcattccactgcactccagcctgggcgacaagagcaaaactcggtctcaaaacaaacaaacaaacaaacaaaacccctgcttgtgagccgtcgggagtttgggtcttcagccttagctgcctgttcccctcgcttggcgccccgctgtaagtgccctttttgagacagctggggaaagcagaacagggacgggggaagggtccctgttttccttacacaccatgctgactgcagccatactcagccatgcagccctgtaaccacaaacgcttcctttcacaaaaataggccaagtaaatctaaaacacacagagtgcttaaaccacaaatgtcgtggctgttaacagtagggactctccacaatccccaaatgcacatccccagcaaggtcctagcccgccctaactgtacctttgcttcattttaatggtaaacatcataccccggatggaaagttgagatgctaatgagacatgcgtcgcgtgaagaagcgtgacagagactgtgcagtcatgatggacagaccaccctaaacatgcaatgatgtcatctggaggaggccggaaggaaaataaatcaacagtccgaccagctttggggagccagctgcaggtctcttcctgtactgtcccccttgctgctccagctgaaagccctgataaactgccttgctcaagcccatcttagactctcggtcaacttctattttctgagggtccactggctgggaacgctgtgctcttggaaactctcccttctagggttctgggagagggtgagggggctcaagagaccggggcggttctccttcatcctgctgtaaatcctgcacctgacagggcagggtccctggtatctatagcatcatctctccagccaaaactcagccctgctctaacagcctgagacagtgccctttctaaatacagtgctgtgatatgatggcaactcacatgtatcaagcattcactgcaacaaacactttgagggattagctcgcagaaccctcacagccctaggagctagacactgcgtgcaggagaggtaactgacccaaagaatgcctggcctctgacctggttaccgcggaggagggtgatctctaggccacaccatgtccctcctgacaggagtgtctttgttgcccaagggctttggcccctggagggtccagcaatgcggtttatgatgggggcctcaggacatcccgtatcagtgccgacctccagagggactgaagaggataggtgagtcacatggttagcgtgtgatggagccccaggaaaagctctggaccccaaagcctcaggtgagcttccctggcaggaagcactcttgaatgttgtcaggcattagggccaggaggtgggaagaccgcccagggttccctggggagaagatggccagaggctccgcgtttagatcccatcagactttggcctgtgcatcttgtcccatggctggtcctaatttgtaacttatttatttatttatttatttatttatatattctgagacagagtcttgctctatcacctgggctggagtgcagtagtttgatctcggctcattgcaacctccacctcctgggttcaagcaattctcctgcctcagcctcctcaatagctgggattataggcgtgcgccaccgtgcctggctaatttttgtatttttaggagaggtggggtttcaccatgttggccagactggtcttgaactcctgaccttgtgatccggctgcctcagcctcccaaagtgctgggattacaggtgtgagctattgcgccaggccattaatttgtaaccttttgcggtaactataattgttaagtatagcactctcctgagttctgtaggtcattctagaaaattatcaaatgagacggtggttgtgcgggcccccaaattcatagcaagctggtctaaagtgagggtggtcctgggaccctcattgttgtggctggggtctgaagtgggggctgccttgtggaacctgtaccctctgaccatagagtttccagaattcaccacagatgctgtcatgatctctgcttcacagatggggaggtagatggacactgaggtttcgtgacctgcccaaggccaggcagttatataatctgttatataatctgcaaatttaaaaatacttaatctaggccaggtgcagtggctcacacctacaatcctagcactttgggaggccgaggtgggaggatcacttgaggtcaggagttcgaaaccagcctggccaacatggtgaaaccccgtctctagtaaaaatacaaaaaaaattagctgggtatggtggagggcacctgtaatcccagctacttgggaggctgaggcaggagaattgcttgaacctgggaggcaaagattgcagtgagccaagattgggccactgcactcccaacctgggtgacagagtgagatctgtctcaaaataataataataataagtaagtaaataaataaataaataaataataaagttaaaaagcacttaatccagctgggcgaggtggctcacacctgtaatcccagcactttgggaagccgaggtgggcggatcacaaggtcaggagatcgagaccatcctggctaacacggtgaaaccccgtgtctactaaaaatacaaaaagttagctgggtgcgatggcgggcgttgtggcaggcacctgtagtcgcagctactcgggaggctgaggcaggagaatggcgtgaacccgggaggcagagcttgcagtgagctgagatctcaccactgcactccagcctgggagacagagtgagactccgtctcaaaaaaaaaaaaaaaaaaaagcactgaatcctaagtgaacgaatgcaggaacagaaaaccatgttctcacttataagtgggagctaaacattgagtacacctggacacaaagaagagaccaacagacaccagggtctatttgagggtggcgggtgggaagacggcgaggattgaaaaatgacctatcggctgggcacagtggctcatgcctgtaatcccagcacttgggaggccgaggcaggtggatcacgaggtcaggagttcgagaccagcctggccaacatagtgaaaccccgtctctactaaaaatacaaaaattagccgggcatggtggcatgcacctgtagtcccagctactcgggaggctgaggcaggagaatcacttgaaccagggaggtggagactgtagtgagctgagatcgtgccattgcactccagctgggggaatagagtgagattccatcagaaagaaagaaagaaagaaagaaagaaagaaagaaagaaagaaagaaagaaagaaaagaaagaaaagaaagaaaagaaagaaaagaaagaaagaaagacagacaaacgacctatccgtaccccagagacatgcaatttactcatggaagtaaactgcacatgtacctcctgaccctaaaataaatgttggaaaggaaaaaatatacccaacaaaacaaaacaagataaaacaagggcaggcatggtggctcatgcctgtaatcccagcgctttgggaggcagagatgggaagatcccttgagtccaggagtttgagaccagcctgggcaacatagcaaaaccctgagacccccatctctacagaaaatataagatttggccaggcatggtggcatgcacctgtggtcctggctacttgggaggctgaagcgggaggatattttgagcctgggaggtagaggctgcagtgagccatggtcctgccactgcattccaggctggccaatgcagcgagatcctgtctcaaacaaaacaaagcaaaacaaaaaaacacaagaaccctccccaacaagaaacctaaccctctatccatgggccacagcgatcccaaggagcatgtcctacaagtgtagaccgaaccccgggagaaggagaggggaacagggctctggacctgcggggcggggtttcctccatattgcctcccttacgatgcagtgatgaggatctttataggtcttttgggggtgaccgccgtccacaccccaccccctccaaaacccagtatcagttatcagagatgggctagatcagtgatggcagaaggggtgtgaagtattgctcagatggatccctgcctgacattattagaaggagcagtgccccccaccctcatcggcacactgggtttggcctcaggctgttccctgaggctggcacagaaccctggggcagccctggcctcggtgcttcctggggagcagatcccattactaaggagaccacccacactgtatgtcctttgcttccagaattgcacccaggctgaccctccacccgcagcagcattctcgccacccccagggtccatagttcagttacacaaggagcttaggctttatcctatcccaaactgtgccctggcctggttggctgcggaagaacaaagacgggaacgtaatgagtcaccatgccatcactctcccggagacctcccaggtgggggacgcctgacttgggttcattcattcattcggcaaatatttatcaaatgcttacgatgtatctcgccctattcgaggccctggagacagagcagtgaccaaagagattaataatctcttttgagaagccgacatcctagtgggagaaaatagacagtaaacctagtgagtgaatcatacaatacaacggtcctcagccctggtgcccagcaccccactgacggcaggccctttccaggcaagctgccaagtgctggcccctgtaacgtgttcagctgaggattcatcccaggccaggaatatgggtgcaagagagtggggtgtagggtcgggagatgcacagaggaggggtggctggtttccaaaaatggccccagcaatatttccatgtctgcatgcttttccttcaggagctggtgtctatttcccctccccttcaacctggttgggctggtgactgtctgacgaaccgaatgaggttgaaatgatgctgtgtgacttcgagtctactttatgaaaggcctttcacttggctgtctctctctttgtgtgtgtgtgtgtgtgtgtgtgtgtctaatatgtagccactagctgcacgtgaccgccgagcacttaaaatgtggctagtgcaactaagcaactgaatttttagttttacttaattttaaccctcccctctctcccctccccgctcctctttctttcttttttgagaccgggtctcactctgacacccaggccggagtgcagaggtgcaatctcggctcactgcaacctctgcttcctcggttcaagcaattcccatgcctcaacctcccaagtagctgggactacaggtgcgtgccaccacgcccagctaattttttgtttttgagatggagttttgctctttgttgcctaggctggagtacagtggtacaatctcaactcaccgcagcctctgtctcccaggttcaagcaattctcccgcctcagcctccctagtagctgggcttacaggcgcccgccaacacgcccagctgatttttatatttttagtagagacagggtttcgccatgttggccaagctggtctcaaactcctggcctcaagtgatccgcctgcctcagcctcccgaagtgctgaggttactggtgtgagccactgagcccagccaatagtaatacattttcactgaaattgcaatagcaacatatggcaccagctcactctctcttgccacccacgtatggagtcaacaagtaagaggtgaaaccctgtctctattaaaaatgcaaaaattagctgggtgtggtggcgggcacctgtaatcccagctactagggaggctgaggcagaagaattgcttgaacccaggagacagaggctgcagtgagttgagattgcaccactgtactccagcctgggtgacagagcgaggaaaaaaaaaatctaagctgttgaaattttaaaatattttgagccctaagggattgtgattataggacatgagtcacataaacaggcagctataacctttgtttctctgattatagatgagcatttttcctcacctacattgttttgaaaatgttgtgactaaagtgtggcagggaagaccccttccctcttcactgttggtcttcatcatagattaacttccccctttcctttcttatgcaaagacttcatgactatcacattgtctaagaacattaaatagactcttaaattggaaaggaaataaaaacaagttgtacagaaaatacattgtgactgattaaattgttgtaactaagccaggtgcggtggctcacacctgtaatcccagcactttgggaggccgaggtgggcggatcacgaggtcaggagttcaagaccgtcctggctaacatggtgaaaccccgtctctactaaaaatacaaagaattagccgggtgtggtggtgggcgcctgtagtcccagctactcaggaggctgaggcaggagaattacttgaacccaggaggtggaggttgcagtgagttgagatcgtaccattgcactccagcttgggcaacaagagcgaaactccatctcaaaaataaataaataaataaataaataaataaaataaaaataaatcgtaactcataaactagactatacaaagtgctatattcctactaaatttctttgttttctgactatacaagcaagactttaacttttttttttttttttgagacagagtcttgctctgttgcccaggctggagtgcagtggcacaatcacagctcactgcagccttgactgcctggccttaagtgatctctcacctcagcctccctactagctgggaccacaggtgtgcaccaccacacccggctaattttttaacttttttttagagatggggatcccatcatcttgcccaggctggtctcaaactcctgggctcaaaggatccatctgccagggcctcccaaagtgctgggattacagtcgtgagccactgtgcccagctaagaccttaacttttaacttcagagcactgaccctattcctgtggagtctgtgtacctgaacggctattctcagcttttcgcttaaatcaactcttttaaactggattttgatccttttggttatttcagtttgacaggctaccttaaagtaccataaggccaactgtggtggcccacgcctgtaatcccagcactttgggaggctgaggcgggcagatcacctgaggtcaggagttcgagaccagcctggccaacatggtgaaaccccatctctactaataatacaaaaattagcctggcatggtggtgcatgcctgtaatcccagctacttggtaggctgaggcaggagatttgcttgacccgggaggcggaggttgcagtgagccatgattgtgccactgcactccagcctgggcgacagagcatgacgctgtctcaaaaaaaaaaaaaaaaaaagggctggatgcagtggctctcgcctgtaatcccagcactttgggaggcccaggcaggaggatcacgaggtcaggagatcgagaccatcctggctaacacggtgaaaccccgtctctactaaaaatacaaaaaattagccaggtgtggtggcgggcgcctgttgttccagctactcaggaggctgaggcaggagaatggcgtgaacccaggaggtggagcttgcagtgagccgagatcgcgccagtgcactccagcctgggggacagggcgagactctgtctcaaaaaaaaaaaaaaaaggttgctttggctgggcgtggtggctcttgcctgataatcccagcactttgggaggccgaggtgggaggatcccttgagcccaggaatttgagaccagcctgggaaacatggtgaggccccatctctacaaaaaagtaaaaaatattagctgggtgtggtggtgtgcacctgtggtcccagctactcggaaggctgaggtgggagcatcacttgagccagggaggttgaggctgcagtgagccgtgatcgcaccactgcactccagcctgggcgacagagcatgaccctgtgtgaaataaaaaaagagaaagtttgctttataatatttcaaaatgatcgatttcccccaccagcagcctccttttatttttttttcaactgcaaattacaattttaagaactagaatatgagctgtaggtttgggctccctaggacaatgtagagaccatttgactttctatgactttcagaagcagcctggacaccccttcccctcacccgaccccaacagaaacccctcagctctgaactgcaatctgctgctggctctgtgtcatcttagcttggcgtctggctggagatcagaaacgccaccgtgctagggaaggctgcaaatctgaatttacatatagatttcccagggcaggtagtttcctagcttttccctgatgaaggtgaggttgttcttgattttctgattatccagaggctgggttgattgtgcaggtttttgcagagtagctttctgggttcggggatggttgtaaggcgagaatttaacaatggaagttgctaaatttgtggaggggtctcagatgcacttactggagattcctctcagaagtccgtgctgcagagtcaaaatactccctctgaggagcagggaagaaagcaaacttgcaattccttcccttcagtgttttggaaccacaccaatttgtacgatcagcattctctgccccttcccctttatttatttatttgtttgcttatttatatatttttttatttttattttttttgagatggagtcttgctctgttgtccaagctggagtacattggtgcgtatgagctcactgcaaccagcgatctgcaatcgcttcccagattcaagcaattctcctgcctcagcctccccagtagctgggattacaggcacacgctcccactccaggctaatttttgtacctttagtagagacagagtttcaccatgttggccaggctggtctcgaattcctgacctcaagtgatccgcccgcctcagcctcccaaagtgctgggattacaggcgtgagccactgcgcctggcccttcccctttgatttcctaacttattccctcctctggctaattttgcattccccttcagaggctgagctggccagcttaatgagcctccccgacttgccatcagatagatggtgcaccattagctgcctgtttaacaaccatatttcttcttctcgatgagggctcaatatctcacacatgaaatattgcttggagagcccccagtccaggacttgaagcaccgagcaattactcagccgtgattccggagcggtggcagcttggtgacagccgcctcttctgtctcctctggttgattggcgaccggaagcaggcaggcttccattttaccagagattgatggcttctcccaactgccagtggctctctgcgaagctccccctccagcgtcctctttctgtcctgacatctagagctgtggggctcagtgcactgcccgtgggggcccacatggcctgcaggccggacccctgccgggggcaggtgactcccaggtgctgacctatggcaaccacagttgtgattcccatgaggtcatgtgacagctgaaaagagatagccgtgcgtggtggctcatgcccgtaatcccaacactttgggaggccaaggcaggcagatcacttgaggtcaggagttcgagaccagcctggccaacacggtgaaaccccgtctgtactaaaaatacaaaaatcagtggggcatggtggcgtgcacctgtaatcccagctgcctaggagactgaggcaggagaatcccttgaacccaggaggtggaggttgcagtaagctgagattgtgccactgcactccagcctgggtgacagagcgagactccatctcaaaaaaaaaaaaaaaaaaaaagagagagagaggtaactagagataggcacacagcgtctactcttcaaagctgcctctcagatcacacactctcccatcccctgggctgttaatgtaagtaagcccttctctgatcccaaagctggtctctccaaattcatccctgtagaaactgcccctgaggccccgcagccccattctttcatcattgttcagtctccctctctctttctggccttgcccttccctctggtctcctctctataagggctcttcgaatgatgtttgtgtttttgttccaccaagtaagaccaggcacagtggctcacgctgtaatcccagcacttatgtgaggcccaggtgggaagatagcttgaggccaggagttcaagaccaggctgggcaacatagtaagacttttgtctctacaacaaataaaatgaaattaagccgggtgtggtggcacatgcctgtggtcccagctactcagggggctgaggcaagaggatcgcttgagcctgggagattaaagctgcagtgagctgagatggcgccactgcactctagcctgggcaacagagatagatcctgtctcaaaaaacacaaacaaacaggccaggcacggtggctcacacctgtaatcccagcactttgggaggctgaggtgggtggatcacttgaggtcaggagtttgagaccagcctggccaacatggtgaaaccccgtctttactaaaaatacaaaaaatagctgggcgtggtggcgcgtgcctgtaatcccagatactcagaaggctgagacaggagaattgcttgaacctgggaggcagaagttgcagtgagctgagattgtgccactgcattccagcctgagagtgagtctccatctcaaaacaaaaacaaaacaaaacaaaaaaaccacacagacaaacagaaccaggtgaacccaggtgactggaggggaagaagagcttccaatcaccacgcagaccaagtggacctgggcttttctccttcttcaaacacaaagaggaaagaacaacaacaaaaaaacaactactcaaaacaaatactcaaaagaaggaaagataaatcctcaggatgggaagtagagttccaggtcacagcaggacagcagagactggcaatcctcaaggtttcgggtgggactgaggttccacggtgggaacaggaggtaacatttggagcttacttgaggtaatgtggtgggaatggagccccagttcaaagcctggagctgtagattgctgcccttaagatggtgaaaaggggagtagaaaaacttcgccttttggaccggggacttggggctttggatagcaaaaaagaagccagttgtcagatatcaaaacccaaatcctgtgccaaaaattggggcagagtgtgattttatactatgtgagagctcaggaggtctgagtcaagaaaataatatcaaaactggtccagaaccgttgacatacgtgagccttggcagaagcaaagatgaaagtgcccttcagggacagttacacaaactagagaacactgaacttccacaggagtgggggcaaatgctttcaatataagccccctccaaaaatagacaaagcatataataaacaaaccaccttgaaagagagacattagaactaacaaaaggaggctgagcctgatggctcacacctgtaatccctgcactttgggaagccaaggcaggaggattgtctgagatcaggagtttgagaccagcttgggcaacatagcaagaccttgtccctacaaaaaaaaaaaaaaaattagtctgacatggtggtgtgtgtctgtagtctcagctattcaggaggctgaggtaggaggatcacttgagcccaggggtttggggctgcagtgagctatgattataccactatactccagccttggtgacagagtgagaccctgactcaataaataaatacatacataaataaacaaacataacaaaaggggaattggcgcaccaataactgaatattttttctttccacatgtgacaaggcagacatgcctttgaaatgtgtttaaaatgacatgagaagaaaaagaaggaatcaaaatcataaagaaaaaacattttgaaaatagagtaagcagacctggaaactaatcaaatagatctagatgtaaaaaatattttcattgaaattataaattaaatttctgagataaatagcagagaagagcacatcgaagagagaattacagaaatagaagataaataaaaggaaatcatctaaaatgtagcacagagatataaagagatgaaaagtatgaaaatatgaaagcacaataaggaaatgtggaagacagaatgagtaggttgagcatgtgttttatagatttagaagagattaaagacaacgtgaggtggggagaggcaaattcaaaatgcaaaatgacaggatttttccataactgaaggaacaagtcatcaaagtatcacattatccaaacagggtaaataaaaagtaaatacacatctggatacactgtggagaaactagagaacatcaaagacatagagatcttagaagaaaccagctgggtgtggtggttcacgcctgtaatcgcagcactttgggaggctgaggctggcagatcacctgaggtcaggagttcaagaccagcctggccaacatagtgaaacactgtctctactaaaaatacaaaaattagccgggtgtggtggcgtgtgcctgtaatcccagctactcgggaggctgaagcaggagaatcgcttgaacgtgggaggcggaggttgcagtgagctgagatcacaccactgcactctagcctgggcgagaaggcaagactccatctcaaaaataaacaaatgaaaaaacaaaacaaaacaaacaaacaaaaaaagaaaccaaagagataaaactacttgcctaaaaagaaataacactttgattaatagaattctcagcattgtccatggatgccagaagacaagcctttaatatcttcaaagcactgaagaagtgtatctgttaacctagaattatatgcccagctaaactatcatccaaaagggagggctaaaatggagacattttcagacaaaggcagagaatttaccattcatggatcctcactgaatgaactattaagaagtttgcttcccttggagtggaaattaaatccaggagaatttaaatgatagttaacctaacaagcattgctataaataatactaatattaataatgatcatgacaattagcccagaagattaaaaacaaagtgaaattggccgggtatggtggcttatgcctgtaatccaagcactttgggaggctgaggcaggaggatcacttgaactcaggagtttgaaaccagcctaggcaacatagtgagggttcatctctacaaaaagaaaaaagaagaaaagaaaaagaaaaaagactatagaccctcaaagtctaaaatatttactaactggccctttacagcaagtttgcagactactagttcagaataaagttcctgggcagtccgtaccacatgggggcagtatagcctcattacaacatcaagattcaggggacgaataaaatgtgataattgactacaaaactggaagaaaaaaagtaaaaataaaatattagccaataatgggcaaatcacttgagtccaggagttcaagaccagcctgggcaacatggcaaggtcttgtctctattaaacatattaaaattagccatgtgtggtggcacatgcctgtaatctcagctacttgggggactgaggtgggaagatcactggagcctgggaagttgaggatgcagtgagccgagatcgcaccactggactccagcttgggtgacaaagtgaaactctgtcttgaaaaaaaagaaaagaaaaaaagctagccaataataacgtgcaagatgggaggacaaaattagagaaaagactgataggtaagttaacagaagtaagtccaaatatatgagtaattacaataatagtaaatgtattaaacttgcctattaattgactgagactcctagaatgaaaaaaaaatccatctatccaaaagtttttttgttttttgtttttttttgaaacagagtctcattttgtcacccaggctcaagtgcaatggtgcgatcttggctcgctgcaacctctgcctcctgggttcaagcaattctcctgcctcagcttcccgaggagctgggactacaggagcgtgtcaccatgcccggctaattttcgtatttttagtagagacagggtttcaccatgttggccaggcttgtcttgaactcctgacctcgtgatccacctgccttggcctcccagagtgctgggattacgggtatgagccaccacacctggccatcaaaagtttaaagatacaactaaacccgaacaacacagaaagattaaaaataaaagttgaaagaaatatgtatacaacagaaagctggtatagcaatattaataccagacaaatgagtcattaagataaaaagcaagttgctagtcaattataaaataaataattcttcaagaactgtactaatcctgagcctctgcgcatctaaccatttggtctcaactatagaaacaaaactgaaggagaaaccaccttgcaattatagtggaaaattttaacatctttgttacaaaactgtagcttaaattagtaggaatatagaagatttaaaccacacaactaacaagcttgatttagacatacatagaaactaaatattctttttttttttttctttaagcagggccttgctctgtcacccagggtggaatgcagtggctcaatcatggcttactgcagcctcgacctcctggactcgagcaattctccccactcagcctcctgagtagctggaaccataggcatgtgctaccacacccggctgttttattttattttatagagacaaagttttgctatgttgcccaggctggtctcaaactcctgggctcaagcagtcctccagcctcggcctcccagtgttgagattataggcatgaactgctgcacccttcggaactaaatattcttttcaaacacacgcctgacactgaaaacaattagatattaggctacaaaagaaatttcaataaacaccagagaactgatatacagactgcctcttctgatgctaaataataaaatgagaaatctcaaatacttggaagctaaaaagcatacttctaaataatccaaaagataaatcataatacaagtatcaaacatttagaagtaaatggcagtgaaagaatggcgtaccctcgcgtgggatacagctaaaggcgataagaataatgaggctggacacagttgctttgggaggccaaggcaggaggatcacttgaggccaggagtttcagacaagcctgggcaacacagcgagaccctgtctccattttttagaaattgcgaaaaagaataatttaaaacactcattacaggccgggcgtggtggctcgctcctgtaatcccagcactttggaaggctgaagcaggcagatcacctgaggtcaggagtttgagatgagtctggccaacatggtgaaaccccatctctactaaaaatacaaaaattagctgggcgtggtggcgggtgcctgcaatcccagctactcaggaggctgagacaggagaatcactggaacctaggagctgaaggttgcagtgagctgagatcatgccactgcactccagcctgagcgacagaacaagactctatctcaaaaaacaaacaaacaaacaaacaaaaaacattcagtagcaagtaatagtgaaaattaataaggcaagcattcaacacaaaaaaatgagaaaaaatacccccaaaataaaaaaagaatggaaggaaaaaaaaataataaagataaagacaaaaatgtatgaaacagaaaatgtacaaaagatagaattaacaaatgtaaagttaattcttcaagaagacaaagtagaagaacttttggaaataaagattatgaaaaaagggaaatcacatataaatatcatgaatacaaaggaaggaatatacagcagaattctttagaaaaacaaaaacaggactattaaaaaaatttgtggcaaaaaattttaaaacagatgaaatagaaaaatgcatagaaaagtagaaattatcaacactatcttaaaaaagtagcagaaaatctgtaagcattcaaacattaaatcagtagtcacaaacccatttgcaacaaaagtaccaagtcagacagcattacagatgagtcttacccaatctttaaggagcaaataactcctatcacatacaaattgttccatagaagtttcttgggataggggcaggaggggctccctaactgcttttaaaagggtgacataaattaatgccagaagcaggcaagaatgatgcctgcaagaaaaatatgaacacagacacacaaatctcaaatcaaaattagcaaagcaaatcaggcaatctggacataaacacttcattatgaacatgaagactttaactcaggaatttaaagacagtcgaacactaaaatatctgctaaagaaatccaccacattgaaacattaaaggagaaagtccatatgctcatcctattagatgcaaaaagggtgtttaataaaatgtaatacccaattgtgatttttaaaaattctcagcaaacaagaatagatagaaacgttcttaaaccaatatgaaacatctaccaaaaccctaccaaaaaaaaaagcatcataatgtaccccccacatgtgtaccactattatatattttaaaagttagtttcaatgtagaatttgaaacaaatcaataaactttttaaattctgtcacattctttaaagcatcacacttaatggtaagacattagaattattttctttaggctgggtgcagtggctcacgcctgtaatcccagcactttgggagaccaaggcgggtggatcacttgaggtcaggagttcgagaccagcctggccaacatggtgaaatccccctctactaaaaatataaaaaattagccaggcatggtgatgcatgcctgtaatctcagctactcaggaggctgagacgagagaatcacttgaaccctggtgtgccattgcactctagcctgggtgacagagtgagacttcgtctcaaaataaataaagattagagttgaggccaggcggtggctcacacctgtaatcccagcactttgagaggccaaggtgggaagatcacttgagaccaggagtttgagaccagcctgggtaacatagtgagaccccatctcttaaaaaaaaaaaaagacaataacaaaataagtatgtctgcttcatcattttaatttaatattttacagaaattttcggccgacataagaaacaattataacagcaaaaattactttggataaatatttggcttcatttaagggccaggtgtggtggctcacgcctgtaatcccagcactttgggaggccaaggtgggcagatcccttgaggtcaggagttcaagaccagcttgaccaacatgctgaaaccctgtctctactaaaaatacaaaaattagctgggcgtggtggcgcacacctgtaatcccagctactcgggaggctgaggcaggagaatcatttgaattccagaagcagaggttgcagtgagccaagatcgcaccactgtactccagcctgggtgacagaaagagacttagtctcaaaaaaaaaaaaaattttttttatttgtcttgatttaattgacaccactgagaattgatagtgacttaaacaaagtgagggagggaaacgattttgcttcccaggagacatttaacactgcattctccacctcccgggttcaagcgattctcatgcctcagccttccgagtagctgggactataggtgcacgccaccatacctggctaatattttttaaagaatatttttagtagagatggggttttgccatattggccaggctggtctcaaactcctgacctcaagtgatccaattaaagtttttaataaagctattttaaaaaaaaactgaaatggatatttctttttcacatgagtatctggaggtggcccggggctggcacttgatcttcatgagatcatgcagagacctagactgtatgtgtcataaaacaatacaatagatctatcgtgcagacctgccctcatcctatggtccaccatccatcatggtccgtctaggcctccatgtatcatggagtgctgccctcatcctatagtccaccatggcctgccaccatgccccattcctggcagtggagtggagaaagtgaggaagaacctgccccttttgttactggaaatgggtcctaatccagaccccaagagagggttctcggacctcctgcaagaaagaattcaggatgagttcacagagtaaagtgaaagcacgtttattaagaatagaaaaattaggaatggaaaaatgcctactccataggctactccagccctcagggctgctggttggctgtttttttgttttgttttgtttttttgagatggagtctctctctgtcgcccaggctggagtgcagtggcacaatggctcactgcaacctctgcctcccgggttcaagcaattcccctgcctcagcctcccgagttgctgggattacaggcgccggccaccacgcccggctaatttttgtatttttagtagagacggggtttcaccatgttggccaggctggtcttgaactcctagcctagagtgatccgcctgcctcagcctcccagaatgctgggattacaggcatgagccaccgcgcccagctggttggctgtttttatggtatttattgatcatatgctaaacaagggatagattattcatgagttttccgggaaaggtgtggggaattctcagaatggaggtttcttttccttttagacttttagggtaatttctggatgttgccatggcatctgtaaactgtcatggccctggtaggagtgtcttttagcattctaatctattataattagggtataatgagcagtaaggacaaggagaggtcacttgggttgccatcttggatttggcaggtttgggccagctcttttactgaatcctgttttctcagctgggtctttgagaactgcatcttataacctcctgtctcatctcatcctgtgactaagaatgcctaacctccagggaatgcagcccagcaggcctcaaactcattttcccagcccctatccaagatggagtcactctggttcaaaagtctcttgacacttccgttaaggacacattctgaaagctgcgcacaacagtcccccacgctctcttgacagtacatgacttctgtggtcatcttagccacagggaagtgggaaagtatagtctttaaactaggcagtcatatgtccagctaaaaatgggaatttctatttgtggcataataaaaaatatatatttggtctctgtgcacagttccaggcacagagctcctgaaaccgttagaatttcctgagtgataggagtatctttttttattcaaatgactcccattgaccacacctgagtttatgctaatgaggtaattcctgatggggtcccaaatgacttcaggatgggggctagtcaccagagagaccacgtacatggttagggggatggacttttcagccccaaaccctacctctgtggcagggagaggggactggagactgagtatgttcaccaataaccaatgatttaatcaattatgcctgcaaaaatggaactttgataaaaactctttttttttctgtagagacagtctcattttatcactcaggctggagtgtagtggcaacatcatagctcactgcagccttcacctcctgggctcaagtcctcttctgcttcagtctcccaagtagctgggactgcaggtgtgcaccatcatcctggctaatttttttttttttttttttttttttttttgtagagttgggtcttgtcatcttgcccaggatggtctcaaactcctaggctcaagggatcctcccacctaggctcccaaaactgctaggattataggcatgagccaccatagccagcctgataaaaattcttgaatagcagggctcatggagctttgaggttgatacatcaaggtgctgaagcgtgacaaaccctgaaaggtcatggcagctctgctcccctctccctcccaaaccttgccctatgcatgacttccatttgtctgtttttgaaatgtacctttatagtaaagctgttatcataaatagagcactttcttctgagtcctgagtcattctagagaattattcaaccatgggtaggagtcatgggaaccaaatttgtagccaacaagcagaagtacaggtagtctggggccatttgcagctggtgtctggtgggggcaatcttgtgggactaggccattaacttgtaggatctgttctatctccaagtagtagttagtgtcagaattgaattgaattgctggacattgcagtgaactgaatgtttgtgtccccccaaaatcacatgttgaaattctaagccccaaagtgatgctattaggagggccttttgggaggtgattaggtcaagggcagaaccctcatgaatggggttagtgtgcttacaaaagagtcctaaatgaccccgcatcctttctaccgtgtgaggacacagcaggaagatgaactaggaagcgggcccttaccagacactgaatctgccagagccttgatcttggacttcccagcttccagaactgtgagaaataagttcctgttgtttataagccacaaagtctatggtgtcttgttacagcagcccaaccggcccaagacagacactcagttggggctggagaaggagataattggttggtgttgaaacgacacatttgttgttggaaaagacatcacacatttggtgtcagaggaaaaaagaacatatttagtggcagaaaacatcagactattactgtagaggaggggagaatggataataggggacaactaagaatctctgccatgtgactgtagaggactaaaaaaggagaataaaagtcgctattcaaagccaaaaataatttacaaactattaaaccatataaaaggtcagcaagattgttggatacaagaatactacacaaaaatcaggaatgtttctctatataaacactcaccaattagaaagtaaaattaaagagaaaaggaaattccactcataatggctacaatattataaggtacctgggaataaacccagtgaaaacactgaaacactgcaaattgtatttaaagttttttctaaataagtggaggaatataccatatttatacttgagaagactgaatatcctaaagatgtcaattctccccagattaatccatgaattcggtatagttttattcaaaatctttttttttttttttgagacagagttttgctcttgttgcccaggctagagtgcagtgacacaatctcagctcactgcaacctccgcctccagggttcaagcgattctcctgccttagcctcccaggtagctgggattacaggtgcctaccaccacgtctggctaattttttttttatatttttagtagagatggggtttcaccatgttggccaggctggtctcaaactcctgacctcaggcgatccgcccaccttggcctcccaaagtgctgggattataggcgtgagccaccatgcccagccatggacaagaatttttgagggtacttttcaacttagtacagggagaaaggtggccttcctggttcatagatgtcctcactttgtcctcacacagtagaaggaaagagggagctctctgggccattttttttttttttttgagacagggtcttgcttgattgcagaggctggagtgcagtagtgcgaacacagctcactgcagcctcaacctcccaagctcaaggaatcctcctgcctcagcctcctgagtaacctggactacaggtgtgcaccaccatgcctggctaattttttttttgtagagatgggttttcaccatgttgcccaggatggtcttgaactcacgggctgaagtgatcttcccaccttggcctcccaaagttgtgggtttacaagcatgaatcaccatgcccagcctctggggcctctttgtaagggcactaatcccattcatgacggctgtgccgaatgacctaatcacctcctaaaggccccacctccgaataacatcacgttggggattaggtttcagcataggagtttggggggtatgaaaacattcagtccctgacgttaacctgacggctgctggctcccgcaatgcagtgggggtgctgaataccaaagggcagcggatctcgcactgccgggtgtttccatcatcaatgcccaacaggctgctccagaagcatgttctgcggttgactttcctagctgccttgtgaaatcagcagcctcagcacagctccatgggtcactccaggccccctgcagccactgttccttcctgttgctcccatctgccccaggcagcccagagcagacactggaaatcttggggcctgcaggtgggctgagcacctggccccctcaggctgccccttgaggggaacatgtcagttgaacccaggaggcctaggcgtctaacaaagtgggatgcctcaaggctcagaccctggctctgccaccttttgctatgaggcccgggccagttactcaacctccacaaagccccagctcctcaaatgtaaaaaggtgggagtgatgctttttgcagggtggtgcaaattgcatgtgtgtgaatgtcccttgctgaagctcccgggcaggagcctggcctccttgttcgtggctgtattattgaagacagggcctggatttcagcaagcactcaatgccaagggaataaatgaacaataataattgcatgaagaataactgaaaaagtaatgagtgaaagagtggggtactattaataaataatgaatgaatgaatgaatgaataataaatgaatataatctaataaacgtttaggtggtgctcccctggctcaggctctactctaagaaatttataattgttagttcaacaaatgctcatagtcatcttgtgaagctggtgccattattatatccattttacaggtggggaaactgaggtgtgggggctaaatatagtttggatatttgtccccacccaaatcttatgttgaaatgtaatcctcagtgttagaggtggggcctagggggaagtgattggatcatgggggaagatttctcataaatggtttagcaccatcctattggacagcaccattggtgctgtccttgtgttggtgagtgagctcttataagatctggtctttaaaagaatgtggcacttcccccaccactctctgtcttgttcctcctctaccatgggagatgcctgctccccctttgccttctgctataagtaaaagctccctgaagcctccccagaagctgagcagatcccattaccgtttcctatacagcctgcagaaccatgagccaattaaacctctttctttataaattacccagtctcagctatttctttagagcaatgcaaaaatggcctaatacaaaaaaaaattgctatgagaagtgtggtattgctataaaaatacctgaaactgtggaagcaactttgaaactgggaaatgggcagaggttagaagagtctggagggctcaaaagaagacaggaagatgagagaaagtttgaaattttttagagactggttaaatggttgtgaacaaaatgctgatagtgatatggacagtgaagtccaggctactaaggtctcaaatgaaaatgaggaaattattgggaactggagcaaagatcatccatgttatgccttagcaaaagcttggctgcactgtgtccatgcctagggatctgtggaaatttaaacttcagagtgatgatctagggtatctagcagaagaaatttctaagcaaaaaaagcatttaatatgtggcctggctgcttctaacagcctagtcttagatgcaggagcaaagaaatgacttagagttggaatttatatttaaacagaaagtatagcctaaaagtttagaaaatttgtagcctggccatgcggcagagaaaaaaaagacaaaaagctttttcagaagagaaattaaagcagactatgtagcaactgcttgctagagagatttgcataactgaaaaggagactggctgggtgcggtggctcacgcctgtaatcccagcactttaggaggccaaggcaggcaaatcacaaggtgagaagttcaagaccagcctggccaacatgatgaaatcccgtctctactaaaaatacaaaaaattagctgggcgtcgtggtgggcaactgtaatcccagctactcaggaggctgaggcaggagaatcacttgaacctgggcggtggaggttgcagtgagccaagatcgcgccactgcactccggcccaggacacagagtgagattccatctcaagaaaaaaaaaaaaaaaggagccaagtattgatagccaagacaatgtgcaaaaggccttaaaggcatttcagagaccttcacagcagcccccacatcataggcctgggaggcctaggaagaaacaatggtctcatgggccaggtcctacgtagcctcacgacactgctccccatatcttggctgtctcacctccggccatggctcaaaggggcccaggtacagctggggctgctgctctggagggcacgagctgtaaaccttgatggctacaacatggtgttaagcctgcaggtgcatagagtgcaagagtgaaggaggcttggcagcctctgcctaattctcagaggctatatgagaaaccttgggtgcccaggcaaaatcctgctgcaggggcagagccttcacagagaacctctactagggcagtgccaaagggaaatatggagtaggaggtcccacacagagtccccatcagggtattgcttagtggatactgtggaaaggtggccaccatcctccagaccacagaatggtaaatccactggcagcttgtaccctgtgcctgaaaaagccacagggtacaacctgtgagagcagccatggggactatactctgcaaagccacaagggcagagctgcctaaggccttaagagcttgtctcctgcacccgtgtgccctggacgtgtgacatggaatcaaaagagattattttggagctttaaaatttaatgactgcctgctgggtttcaaacttgcatggggtttgaaagcttttgttttgctgatttctccctttcaaaatgttgatctaatgcctatatccccactggatcttaaaagtaactaacttgtggtcgggcatgggtagctcacgcctgtaatcccagcactttgggaggctgaggcgggtggatcacctgaggtcaggagttcgagaccagcctgaccaacatggtgaaaccctgtttctactaaaaatacaaaaaattagccagatgtggtggcacatgcctgtagtcccagctactcaggaagctgaggcatgagaatcacttgaatccaggaggggaggtggaagatacagtgagccgagatgctgccactgcactccagcctgggtgacagagtgagactctgtctcaaaaaaaaaaaaaaaaaaaaagaagtaactaacttggttttgattttgcagcctcagcctcataggtggaagggacttgccttgtctcagatgagaccttagtcttcggacttttgagttaatgctaaaacgagctaagactttaggagaccattgggagggcatgattgtatttagaaaggtgagaaggacatgagattggggtgggggatggggtggaataatataatttgaatatttctcctctccaaatctcatttcaaaatgtaatccccaatgttgggggtgggacctggtgggaggtatttaaatcataggggtggagctctcataaatggcttgggccacccccttggtgaaaagtgagctctcattctaagttcacatcagatctggttgtgtgaaagtatgtggcacctgcctcccttgctcctgctctggccatgtgaagtatccgctcccacttcaccttctgccatgattaaaagctccttgaggcctccccagaagtaaagcaggtgccatgcttctatggcctgcagaaccatgagccaattaaacctcttttctctgatgaattatccagtctcaggtatttctttatagcaatgcaagcatggcctaatacaagggctaagagacttgttcaaggtcccacagctaaaatggggggagaagccaggactacagccgactactgactccatgctcttaaccaccacattccgtggtctaatgagcactaaaattgcctatgcttcctacagggataggaaatgtggatggtggcagtgggcaaggaggaagggaagaaggggacctttgccccaaggagtggagccagtttcaggccatcagcaccagaggcaaggttcaaactgtgaacacttttgtatccctggtacctggagccatcggtggctcatagaagtctgtgaaaggatgaagacaaatattggagcctactagcaatttgcctggagagactagcgctttccacaaagtcctacacctggagagaggttggtgtcatctgtgtgcttcccaggtaatctctgaagagggaacaggaagagtaggtggtccccgtaagtggttggcagctttcatcttccaaaagccaccccaatttagactaactgggtagagctctatctgacaaaggcaagaggctgaattatagactgttggatgatttttaagagaactttaaaaatacccacagcaacatagctaacaaaatagaatttgcctagtcaaatttcttgctgccttctggaatgcatgcaaagagaaaatttgcaatcagcattttcatcatgtatgaatgaaatgcttgagggtgatggaaaagttggtgcttattcccccagaacccgacacaccagaccaaacccgaccacatgcctgtctctccctggaaatggccttcctgtttccaccaggcagctcctagctatgctccttgacccattgctgctttcacatcttccccagccctccatcagatgtgcttcccctctcctctgaactcccacagaacacaatttatagccccttctgccagagatttcatgttgccttgtaaaagtaagaataagaactcccctttactgagcacttactatgcaccaagcactttgcccacattgtctctttcaatcctcacatcaacttagtgtggatcgttattaccctgatctaacagaggcagacgctaagaattagagagattagtcacttattatggatggtgtattagtccattctcacgctgctatgaagaactacctgacactgggtaatttatgaaggaaagaggtttaattgactcacagttctgcactgctggggaggcctcaggaaatttacaatcatggcggaaggcaaaggagaagcaggcaccttcttcacagggcggcgggacagagtgagcacaagcagggggaatgccagacacttacaaaaccattagatctcgtgagattcactcactctcaggagcatagcatgggggaaccacccccatgatccaatgacctccacctggccctgcccttcacacgtggggataatggggattacaattcgaggtgagatttgggtggggacacagagccaaactatatcagatggtttcaaagaaactacccaactaggcttctctgatttttctcaacttctacatgcgtaatatatgaattaaagagggtacattgatttggggaaagggaagagcaagctgccttttataggctgtttcgacatagacaggtattgtgttatttactgctccaacaactccatatttttataacatttgctctgtaactgtcagacgatgtgccaggagttggaatttcaaaaaatgagtaaactggggcacagaaggagctctcagcctcctgagggaaatggtgtggttgtgaaataaccatgacaatgtgcccatggagaaggcagtcatgggagcggtgagtgagcacagggtcatcatcagccctatgagagtgatgttttaaaggatgagtacaagtctcctggtaggcaaggggaaaaggtcattgctgggaaagaaaatggtgggcaaatgggtgtaacaagtttggagaatggagtgaggaaatcaagcagtggggggtggaaggtgagagggagagggggtggtggtgggtgggtggactcctggacccacaatgagggatagcaggaatgaaccatttacaaccagtgaccatgaagcaggaaaccttccgtgagtgtgaagcctcaccttcctttactgggcagtggtttcctaaatccatcacttcatttcctctgtcacctttgccttgtcaaaggtcaccagcagctcttaatggtcaaatctcctgattttcattggtttcagtatctccccaaactcttcctccacccaggaagttttcaatcttttcttaccccagacctctttgcagcctagtgacgtctttggtcccttcttagtttttaaatgcatagaacaaattcatacaatcacaagaaagccaaccatatggaaatacagttattaaaatatttaaaagcccagtttgtgatgtagaaagatgtacttgtttactaaagcataaatcgtacaacccagtggatggccttataaccacagtcattttgtaatagtgatcagcgtaaatgatattgcaagatttctgcaacagctgtgatggaatgaaaaaatctgtaattgttttttggtgagaaagtcaagagtgtgtctaatactattgtgttttgtcaactgcatttataattagaggaaatggtaaatatgagacagaggtttgtgaaaacagagaattatttttttcttctatccaaatgcatgccctccctaaattctatccaaaaatcccttggggatcttgcatgccaggttcaaaaccccaggtttacactattaattctcccccaccctttcctgtgactctgtcccagccatcttcagaggagggggttgggagagggagtggcctccatctgtctgtcaaggacttctgcttcctttaatagaaaacaaaataagaggatgtgttgagatgaacaaagatgtgccaaccactcccaattccagataagtgaggcaatgctcacctgtcttaccccatcacagggcctgataccccaacccaccgcccccaagccatggtcatcacctctgcacataaccaaaccccagacacttggccaaagagatccaggacccagaacaagaaaaaggagcaaatgtatgtccacaaatgcttctacactcctcacttcaaggaagtttaattccctccttttgagaatgggctgaacttaggaacttctaacaaatagaatatggcagaaattatcatctgtcactcctgagactaggtcataaaaggcactgcaacttcctcttagatcactccctttggggaagtcagccaccatgttctgaggacactcaattagcctttgagagagatccacatggcaaggaactaagaccttctgccagcagccagagaggaaatgaggcctccagtccacagctatgtgagggagccatcttggaaatggtttctccagtcccagtcaaaccttcagatgactgtagccttggctgacaatttgactacagcctgacaatttgactacagagagggaacttgagccagaacctaccccagctgagccactcccgcattcctgaccttcagaaactgagataacaagtgttgattgaagctattaagttttcgagcactttgttaagcagcaatagattgccgatacaagaagtatgaagaggacaaatcctgttcctctctaggggcctggaggggaaggtgctgaggaagaggagggcagggtaagttgccaggggcagccttttgagagggaggcctcacagggtgtgttgggcacaaccttggcgcctacatccaacagtcctgctgatgacttctgtacctgctgtgccccccccgtttaagagcacgttacacaacatctcgggtatcagtttcctcaactgtaaagggtgtaataaatcagcctggagttgctgcaagggttcaaggagttaataataatatatgcagtgccaacaagaatgccaggcgcacaggaaatgctcactaagtggtgactctttgcattaactccagggccctcctggctccaccaggctcaggtgcccagacttggctgttcctgagggaggccactctcctctgacacccaaaggccctggaacccgaaggatggggatgaggcacttcagtgcagctgcagtgcatccctgagcttcatcctgtctccagctcatcctgcctctggtttggaaagggccctaaagagcacctgacacatgaaaagaaactcaacctccctcataatcagggaaatgcaaattgaaaccacactgaaatggaagtggtcttagggtttatcagcagatgaccagataaacacaatgccgtgtgtcatacagtggaatattacccagccatgaaagggaaggaacacacaccacaaacaggtgaagctctgaaacatggtgctcagtgaaggaagccatttacaaagagccgcatattgcatgatttccatgaaatgtccagaataggcaagtccacagagacagaaagcagatgggtggttgccaagggctggcagagggcgaaatgcaatgatgcttcacgggtgtggactcttttttgtttgcttgtttttttgtttttgaggcaggatctcactctgtcacccaggctggagcgcagtggcacaatcatggctcactgaggcctcgacctcccaggctcaagcaatcgttctgcctcagccttccaagtagcttggtctacaggtatgcaccactatgcctggctaatttttttcatttttcatagagacggggtctccctatattgccaggctggtctcaaactcctgggctcaagcgatcctcctgtctctgcctcccaaagtgctgggactacaggcagagtaggggactttattttggggtgacgaaaatgttttagaactaaatagaggtgattgcacaacactgtgaatgtacttaatgccactgaattgttcaccttaaagatggttaaatttatgttatgcaaattttacctcaataattttttttaaagctacaccgagatgttgtttctgttgttgttttagacaggagctcaccctgtcacccaggctggagtgcagcggcgcaatcacggctcactgcagcctctacctcccgggctcaaacgatcatcccgcctcagcctcccgagtagctgggactacaggctcatgccaccacactcagctcatttttgtattttttgtagagacagggtttcaccatgttgcccaagctggcctcgaactcctgggctcaagtgattctcctgcctcagcctcccaaagtgctgggattacaggtgtgagccaccatgcccggccaagataccacttcagcagatcagcgagagtgaaaggatgaccacatgctgtcagtgagactgcagggacaggctgtctgcaccatgttcacaagagtgtaaactggaaaaaccttcaagagaccaacttcaccatctgacagcatctgttaaagacttacagcctttgacccagcaatttcacagcaggtacttaccctgcaaatatactagcacacacgaggaatgataccagtagatgaatatttgttgcatcattatgtgcaatggcaaaatattgcaaagaatataaacttcgccatgcgccatggctcaagcctgtaatcccagcactttgggaggcagagggcaggtggaccacctgaggtcaggagttcgagaccagcctggccaacatggtgaaaccttgtctctactaaaaatacaaaaattagccgggcgtggtggtgagtgtctgtaatcccagctacttgggaggctgaggcaggagaatcacttgaacctgggaggcagaggttgcggtgagctgatattgtgccattgcaccccagcctgggcaacaagagcaaaactccagctcgaaaaaaaaaaaacccataaatattcaggggatcagttaattaaatggcagcaattcatacagtggaatccaaaaaagaatgaggccgctccttgtgggcttactaagtgaagaaagcaaggtacagggcaccatgtttatacacctcacttgtatacatgtgcacttcttgtacatatgtggctgagcatatatacagtagccctagaaatatatgcaagaactagtaagaatttctcttggcgggtgtggtggctcacgtctgtaatcccagcactttgggaggccgaggcgggcagatcacctgaggttaagagttcgagaccagcctggccaacatgacgaaaccccatctctactaaaaatacaaaaattagccaggcatcatggcgcatgcctgtaatcccagctactcgggaggctgagacaggagaatcgcttgaacccaggaagcagaggttgtggtgagctgaggtcacaccactgcactccagcctgggtgacagagtgagactccatttaaaaaaaaaaaattcttctgggcataaagggagaggcctccaagaagaccccattgagcccacctcctggcgtccacatcctgaagtagtcgctccgttattgtagtaggattggtctatctgacccagagaatatggcagaagtatgtcacttctgaggctgttaggagctaaataatgtcccctgacaaattcatatattgaagtcctaacccccagtacttcagaatgtgactgtatttggagataagacctttaaagtgataattatggtaatataatgtcacatgggtgggccctaatccaatctaactgatgtcctcataagaagaggaaattaggacacgagcatagacagagggaagaccacgtgaggatacagggagaagacagccatctctaagggagactcagaaagccttctgaagccaggcatggtggctcacccctgtaatctcagcactttgggaggccaaggcagatggatcacctgaggtcagaagttcgagaccagcctggccaacatggtgaaaccccatctctactaaaattacaaaacttagccaggcgtggtggcacacacctgtagtcccagcttctcaggaagctgaggcaggagaattgcttgaatcctggaggtggaggtttcagtgagctgagatcatgccactgcactccagcctaagtgacagagtgagactttgcctcaaaaaaaaaaaaagaaaagaaacaagaaaaagaaagaaagagagaaagaaagaaaggaaagagagaaagaaagaaagaaagaaagaaagaaagaaagaaagaaagaaagaaagaaagccttctgaaagaggcctcagatgaaaccaatcttgctaataccttgattgcaatgtctcgcctccaggatcgtgaaaaaagacatttctgttgtgtaagccacccagcctgtggtactttggcagccctaacaaattaatgcaggcaaggtcataaaaggtaccgtggcttcttgccagctttccttctcagaattctcagtctgggggaagccagccagcagccatgctgtgaggaacctcaagtggcctcatggagaagcccacgtggtgaggacctgaagcctcctgcaacagctgtgtgaggagccatcttggagtggattctccagcctggtcaaaccttctggtgatgtcagccctggctgacagcttgattgcaacctcttgagatataaccacacagctaagctactctgaaataactgacccatgaaaactgcatgagatttaaaaagtttgttgttttgggctgccacatgttggggtaatttgttacacagcaatagctaactattacaggaagtgtccacttttgtacccatgaaagcctgaattatggcccccaaagatatccagctcctaatccctggaagctgtgaatgtaaccttctatggcaagagggcctgggcagaagtgattaaggcttgaggtggagagaggatcctggctttcccggatgggccccaaatgtaatcacaagtgtccttaggagagggagtcagagggagatttgactacaagggtaaaagaaggtgatgtgaggactttggcagaaagatttgaagatgctacactgctggctttcaagatgaaggaagaggccacaagccaaggactgcaaggaacgtagtagctctagaagctggaaaagcaaggaaacaagagcctcccctagagcctccgcagagagtgccgcctaccagcacctggattccagcaccgtgaacgtggttttttatttttatttggggaaagggtctcaaaaataaaatgttagctcactgcagcctccacctcctgggctcaagtgatcctcctgcctcagcctcctgagtagctgggacaacaggcgtacaccaccaagcccagctatttttttgtgtgtattatttgtagagatggggtttcgctatattgcctaggctgatctcaaagtcctgggctcaagtgaccctcccacctcagcctctcaagtagctgggactacaggtgcacaccaccacacccagctaatttttttttcagtagagacaaggtttcaccgtgttgctcaggctgatcttgaactcctggcctcaagtgatccacccacctcggcctcctaaagtgctgggattacaggcgtgagccactgcacccagtcagtgaaagtgattttggatttctgatctccagaactgtaagagaataactgttgtctaagccaccatgtttgtgtaagtagtgacagcagccgtcggaaaccatttcagcacattttgtgtgttattctgaggatgcagtgtgtgcattcgctggctcatggtgggcctgtttgccccggtccctcctcacctgctgcagctgtggtcgggtctgacctctgcaggctatttctaggcccagactgcctccagtccatgggaggcactggtgggagactggagggtaggcattctggggagttcatgctctccctctctgtcttgggctacatctctgcatggctgtgaccccacccatggctctccacaagtgaccccagtcctgaggtcctggtagctccacatcttccctttgtccctccatccctcagcgtggtagcagcttcccatccctgcccccttatcatccatgccatcattaagtgttaagcaagtgatacctgttaccaccttcagtggaagagccctattgagtggcgggtcctgccaccaggagcagcagtcctgggacgtcagccccctgcgtggcttgtgggtgaggacggtgccaagaaagacacgactcacacaggcacaggatggaaccatgctagactcacctagacagcaggtggagcatgatcagctgcaatagtgagtgtcagcccccgccgctccacgtggcctagcactccagggagagggtctgcgtgcacccctctcaccccaaccccccactgggaacagatagagcagtgggtggtgggtgccacaggatgcacacactcaggcagaacagaaggcccatcaagtcaagcacagggaaaggtatccccgaagacagatgcccagcacgggctgggagagctctttctttatttgtaaggaagtgatctgggcccacggcccattctcatgtgactattcgggttgagagactgcacgcccaaggctggctttcccaacactctctccattaaattctctctgggttcagtacctgaagtgctttctattttcctgcctgggccttcacggagcctcaaacaatatgataaacaagagaaatcggttataggagttaaaaatttaaaggcatgttttgttcagcacgagctctgtccttgaattgcctctacagcattctcagccaggggttgtctttagttttaattggcttttttttttaagagatgggggtttcgatctgtcacgcaggctggagtgcagtggtgcaatcatggctcactgcagcctcgacttcctgggctagagatcctcccaccttagcctcccgagggatgcaccgtcacacccggcccgggggtctttttccactgttgcacctgtgcacgtgggcttctctcctccactcagccacccactgcctcctcctccaccctccattctctttagtgccaagcggcctcactcctctctggagcctgcccagctgtgacctggatttctccatcatgaggaccaggtgggctggggggtggggtgccacttagagatggctttgccgtgggctgccaaacagaccaagccctgtttgaccatcgtgagagccagagagatgtgaaaaattataaaaaggcagagcatcaatgcaactgtgtgtgcgcactatggatccactgaggctccaggggcaggtgggccacttctcatctgcccccaacccctgcaaaggccccagcgcctcccccagctggcccctcttccgggcagccccagccccagcagctgtggccggaaggaaagcttcagtgattcccgaagcaaagcagacagtcgagttcggagtgtgagtgatgttcgcttgcctgcccagtttcttgtttttagagtctgacacgggaacattgcgaggtgaccacatttttcaaagctcaaattgagacagatggtctgcccaaagatgttttcccgatttagccatttacttatataaaaagcgttacaaaaaagtgcacacaccaattcacatttgattgtccatttaatgaaacgtggctgaggagcagaatcatgccttgaccattgggggcaccaagcggcctggatggggagtgtggggcagggaagagggtgaagaggcccccaaagggagcccaggatagagatcttcggagtgggggtaacccctggggagtcagccccctccaggcccagccctgggatcaggaggctctgggcccccctttgcaaaccctccctcagaactggctataaaaagtggtttgctctgggctgtggcggtgataaacagtccccaaagactcaggaaaatgtctgcagctcaccagctggttcttcactccgagccattactctgcagggcaggtctcagagactggaggtaagccctgtgccccctgccgaactcaaaggggctcctgtgggtgaggccccacgtgggggcctggcccagggcctcctgccccactgtgctgtgcagagatgaggcggcagaggctgagaggggctcagccagcccccaccggggtccttatgccacagtcatggcgtcattttatcagcagtaccagctcacgagtctcgaacatttacctggtgctgagacctgatcttggtactgcagacttgagctcattctgaactcatgtgcccaggtgagaaagatgccattattaacctctcattttacaaacaggcacagaggaggcagtgacttgagtaaggccacacagctcgtaagcagtggaggtgggatttgaacccgggtccatgtgactgggtgcctctgcgagcagtcaccccctctcctgtaccaaggctttctgcagacatctacttcctctctgtgtgaattttcccagagtgggaccaccccttccctgacttcccccactcccactgctgcccctcgcccagccgctgccacctgggattgccttgtcacctcccagccaggctttgctttggggatgggagtggaaaggtaggcaggaatggcttcactcttttgcccagtgaccctcttaaacagggcttctcacgccccacaccagccactgtaggtgtcacagagaagggctgggtcctgaatttcctcttctcaggatctggctgagggagggcaagctcggtgggaggaggctctcgaggtgtgcacctttctcccttagctggaagcaagggcatggatggggatcgttcatttgagggtgaccccaggaagcagaaatgaaggacaagccagtaaaggttgtgttaggagcctgaggctcagactgctggggactcgctaggagctgcttgggatgtgcctcagcatcacctcccaccccaacacacacgggcctggatgcggcgactccaggcctccgtgttccagggttgtcccaggggacgttggcccctctgcattttgggactgccctgagtgtgggctgaaggtggagacagttcagggcagtacttggaggtgaacaaggactgtccctggggtccccattgtctcggctgaaatcagaggccagcaagcacctgctgcctctccccaagacacaccatccaaccctccggcccagccttcccctgccctctctggacgtgccaggcctctgtgccgtcccccaggctcacccttctgcacctctcctcactacaacactcaactccagcatcacctcaccttccagggagccagtctctccgtcctctgcaacctgtagccatctgcacaggcctctgccaccaggataagaaccatttgggagacactcactatgtgccaagcacagctcagcggtctatgatgggatccatctaacaccatcacactctgcaatgggctcatgagcatcatctctttacagacaaggagagatgctcaaagtcacatggctggaaagcgcaggaggcaagatttaaagcgactcctggtctgacctcagctgacacagagcccttaacgggcagcgctggaatcactggtgcgatgtccatctctcccctggacaacaagcctctagggcaggtggggagtgcacaacagctgcccgtccacattcctagcacccagtgctgtgcgggtgcgtggtgtgcactcagatgggaaggtgtgcacacaggccgacagatggagtccaagctcttatgcctttcaaactctcactcccacaggcggccgccggcaaaaatagccagctcatttgaatagaagggcaggaggaaaagacaagaacccaacttcagacaaatggaaattttcaaaagaggaaggcagcggccaagcccggcggaacacagctccagcctagcaatttagcacgattaactgaagccgcagccccagtcaatataatagtgggcgcattatcagttttgccacaaaccattattcattatctctgggttgtgttggctcaccctcagccggctggagcgccgcggcttctcctgcagccagctatattgtaatcagtcacattacagagaaacgttcctggaggaaatcgtgccatcgcctggcgtgtcagctgctcgcagatcggaataggaatgttccaaggtgcagtaatgtggtgtgacattgtgcgagttaatttatagaaaaattaaacatcatttggagccgagcaagggagatgagcgggggactggcttggtttcagacaatatttaaatggcctcggggtattgattctgcaggaaatctttgcaaggactcacggtggttaataaatgtttgtccaaaatcccccaactcagtctagacgtgcacaatgaagacttagaaagcaaaatatagctccaaattgcaagcgtttctttggcgtaatgagtcttagagagatgtggggaacttggaggagggacgctgggagcagctaggggtgggggtgggggtgagagagcagaagtcaccaactaagaagacagatcccgagtcccctccatgggccaagcaaggtgctggggctgccaggatggggccacgcaatccctgaccttgagggaaagaggagacagggcaaaaatgcacctaaccaaggccaaggtctgactggagcagctagggagatgccctgatcccttcctcttcaccctgtgggaatcctccacactacacagtagaaggtggccagacacatggcaccaatactggactgatgagacaccagcttattactagcagatacttctggaggaggaagacactgtgggccatgcaggaccacatgagggtacaccccagcgcagagtgaaccagaggggctgtgaggggcagcctttgtagtaacaaaagggtgagctgccctctgattggcttgtttgaataatgctactggctggcagggaggtgagaccgttagattgaagacacgtggggcgtagccaatctagctgatgcgggaaccaggtaagcagcctttcctgctgggtgggggggcgtgcctggtgagaacaggaggcctcacagctactaggcccattcggggctttgtggggctcaaagatatcaaagcagcacttgttgattttattttattttatttagagacagagctcaccttgaagcccaggctggagtgcagaggtgcagtcgtagctcactgctgccttgaactcctgagctcaagggatcctcttgcctcagcctcccaagtagctgggattacaggcatgtgccaccatgctcagctaatttttaatttttttgtagagacagggtttctccatcttgcccaggctactctcaaactcctgggttcgagccatcttcctgccttggcttcccaaagtgtggggattgcaggcatgagccaccatacctggccaaagcaacacttaatatagcattttttttttttttgagatggggtctcgttccgtcgcccaggctggagtgcagtggagcaatctcagctcactgcagcctctgcctcccaggttcaagtgattctcctgccttagcctcctgagtagctgggattacaggcacctgtcactacgcctggctaattttttgtatttttagtagagatgaggtttcaccatgttggccaggctggtctcgatctcctgacctcaagtgatccgcccacctcggcctcccaaattgctggggttacaggtgtgagccaccacgaccagccttaatattgcatcttgatttggagcctggcagggcaggaggtgcaggcgaggtgagcgtgatgggaagggagcaccccctgccacgtggatggctggaggtgctgaaggccgcttggatgggtggaggtgctgaaggccgcgtggatgggtggaggtgctgaaggccgcgtggatgggtggaggtgctgaaggccgcgtggatgggtggaggtgctgaaggcgttacagagcaggcagcattggaggctggccttgaagggtgagtagcatatcaggacaaaaatgagagcaagggcttcagagctgagaaaatctcatgagtaaaggcacagggacaggagacagtgcagggcttgagagatgggtgggcggagagcctgctgtgaagaagaacataaggtgtgggaaggggaggcggtgaggggccgggaaggtgggaggcaacagattgcagagggtcagggggcaggaattcttcaacgtagagaagaaaagattcagacagaaaaacaacccctagctgtggtggctgtaatgatcaccagtctataaaggactcttacggagaagttggtccccacatgctgcagagaccacctggacctaaacacccctcaaatggtgactcccagccagggttctccctgaattccagactcagatgcccagagagatctcaaaccaccgctcgtttcatgaatgcctgtgagtcaccaggcagagtgtgagaccttgtgggtccatcaatggataaaccgaagagggtcctgccgtgaggcgctcctcttccaacctttgcctccctagaaggatgtcagcaatgcctgggcaagtccacactgaaatgcacgttcctgctctttctctgcagagccacatctcctaccaaagtctccagaggggtttggagcctgcagttccaaagcttgaagccccggtgtcctaacctggctgctcatgtggcctgatctgccaaatccggcattggccatgtcctgccattactgccaaaacgtttctcagatctgtgccttctgccttcccctttcttgtgatcacaggctggttcaaacctgttcaaatagagggacacggccaagcgcagtggctcacgcctgtaatcccagcactttgggaggccaaggtgggtggatcacaaggtcaggagatcgagaccatcctggctaacatggtgaaaccccatctctactaaaaatacaaaaaattagccgggcgtggtggcgggtgcctgtagtcccaggtactcaggaggctggggcaggacaatggcgtgaacccgggaggcggagcttgcagtgagccgagatcgcgccactgcactccagcctgggagacagaacgagattctgtctcaaaaaaaaaaaaaaaaaaaaaaaaaaatagagggacacacacacacacacacacacacacacgagaacttttgtgtctccccccggatcacaacccgtcttgtcaccttcaatccctcctacacagtcatagggtaacttttcttttcttttttctttttttgagacggagtctcgctctgtcgccaggctggagtgcagtggcaccatctcagctcactgcaacctctgcctcccaggttcaagcgattctccggcctcagcctcctgagtagctgggactacaggcgtgtgccaccgggcccagctaatttttgtatttttagtagagacagggtttcaccatgttggccaggatggtctcaatctcttgaccttgtgatccacccgcctcagcctcccaaagtgctgggattacaggcgtgagccatcgcaccggcccagggtaacttttcaaaacacaaacctcttcgtgccacaccgcagctcaaaagccctcccaggctccctatcacctgtcaggaaagcccaagctccttagcacaggctcggtgcggtacccgcagtcttcagttgtggcactttgcctgtctcatcaatgccttcttctcaccctgtgtcttgcacacaatactccaggaaatggcttaattgcttgcagatgccccccagatactgcggtagatgaaagtactggccctaactcatcgcctccctgcatttgcaccttttatcatgtgaattttcagttctcccaaccagaggcaagatgtacttccctgccccttgacttcaggcttagtcatgggacttgctttggacaatggggtgtgagcaggcctgacacagcagaggcctgaggtgcaccatgcatttgagcttgcctcttgcacctctccggtcaccaggaggagggcttcccaggagtagtggctgtgcctggatccccacatgatacacaaggaaggccaagcatggtggttcacgcctgtaatcccagcactttgggaggccgaggcaggaggatcacttgaggtcaggagttcgacaccagcctggccaacgtggtgaaaccccgtttctactaaaaatacaaaaattagccaggcgtggtggtgtgcacctgtaatcccagttactcgggaggctgaggtggaagaatcgcttgaacctgttaggtggaggttgcagtgagccgagatcgcaccactgcattccaggctgggcaacagagcaagactctgtctcaaaaaaaaaaaaagacactgggtgcagtgggtcatgccggtaatcccagcactttgggaggcagacgcaggcagattacgaggtcaagagatcaagaccatcctggctaacatagtgaaaccctgtctctactaaaaatacaaaaattagctgggtgtggtgtcgggtgcctgtagtcccagatactcaagaggctgaggcaggaggatctcctttttttttttttttttttttttttttgagacagagtctcactctgttgtccaggctggagtgcagtggcgcgacctcgactcactgcaagctccgcccccgggttcacgccattctcctgcctcagcctcccaagtagctgagactacaggtgcccgccaccaagcctggctaattttttgtatttttagtagagacagggtttcaccttgttggtcaggatgggcttgatctcctgacctcgtgatccacccgcctcagcctcccaaagtgctgggattacaggcatgagccactgcgcccggcttacaggaggatctcttgaacccaggaggcggaggttgcagtgagctgagattgcaccactgcactccagcctggtgacagagtgagactccatctcaaaaaaatgatacaccaggagcacagtcaccctagcccacccacagacctgagcatgagtaaatgattgtggtatgaagtcactaaattaagaggtttggtacacagcgttattgtggcaatatttgacagatataaataccaccttgctgttttcagattttttagttcttgcttccttttgctttccctccagcctagaatactcttatacacttctcttggcctaaatatatttctaggctagttcattgttctgttcttcagggggccttttccaccatttccagaaatgctgccatctcatctctgagcctgcatttggagaaaaagcgtcagggcaggtggaaagcagagaaggagcatggctcctctgcgcaccagcttgaggccatgtctcctcactttcttccaggaaggagagggggtagcatctcccactgtttgatgttcagccatgggaacctgccagctgctctctgggcccacctgctatttgcaccaacctaggaatctgtgagatgcacttgccttcccagttacagtgtgtcagttcccagccagagccctgtgtagttgctacacaagatagaattacacgcaattctctgctcttgaatttaaacagctgctaacacctacctgatcacattgtatttagtaaccagccagcctgtgttttaattccagtctcctagcgcttcccagcctttattacgcgccagagatttctgtgcaaacacaactggatcttcgatgcctctttgacagacttggcaatccgtttgccctcctatgcctggtagtgatggaggcctgacttatccctccctcccttgggagtctattaatggagggggagatgcacacagaggcacacacgtggaaagagcttttgaggctgaaaaactgctcagcttaaaagagctgcaggcacatctctccagcctccagggtttcccttggtccccgtgatggcagccagcagctacaggttctgacatcagttgtctgctttctgccaccgatttctgggaaccattgagggcaggagagcctgcctatgccagtgctaccctaagatgtgtacactgttgtttattcttctcctatcaaggcttctcttggggcgattcaagctggaatacagactgccggcgcgggcccggtagctcacagctgtaatcccagcactttaggaggctgaggtgggtggatcacgaggtcaggagatcgagaccatcctggccaacatggtgaaaccctgtttctactaaaaataaagaaattagccgggcatgggggtgcatgcctgtaatcccagctactcgggaggctgaggcagaagaatcgcttgaaaccaggaggcagagattgcagtgagccaatatcacaccattgcactccagcctggagacagagctagattccgtctcaaaatttaaaaaacaaaaacaaaaaacaaaacaaacaaaaaaaaaaaacacagactgcctttcagatgttgtgtattagtccgttcttgcgctgctatgaagaaatacctgagactgggtcatttataaagaaaaagaggttgaattggctcacggttctgcaggctctacaggaagcatggcagcgtctgcttctggggaggcctcggggagctttgactcatggcagagggcaagagcagatgtcttgtaagagcagacatcttacatggcaggagcaggagcaaggagggggatgccacacactttaaaacgacaagatctcacgagaacagcaccaagaggacggcgccaaaccattcatgagaaaccgcgctcatgagccaatcacctgccatcaggacccacctccaacactggggattacaatttgacatgagatttggtggggacacagatccaaaccgtatccagttgtgatagattaaattactattcagcagatactctgtgtgcactgtgggcagagggtacttccctgctccactgatatttttaaattattattattattattattattattattattattcaagatggagtctcgctctgtcactcaggctggagtgcaatggagcaacctcggctcactgcaacctctgcctcctcagttcaagcaattcttctgcctcagcctccagagtagctgagattaccggtgcctgccaccatgcccagctacaaaattttgtatttagtaaaaatacaaaggggggaggggggagggatagcattgagaggtatacctaatgctagatgacgagttagtgggtacagcacaccagcatagcacatgtatacatacgtaactaacctgcacaatgtgcacatgtaccctaaaacttaaagtataataataataaaaaaaagtccaaaaaacacaaaataacttttgtatttagtaaaaatgcaaaataacttttgtatttagtaaaaatgcaaaataacttttgtatttagtaaaaatgcaaaataacggccaggcaaggtggctcactcctgtaatcccagcactttagggggccgaggtgggtggatcacctgaggtcaggagttcgagaccagcctgaccaacatggtgaaaccctgtctctactaaaaataaaaaaatagctgtgcgtggtggcgcgtgtctgtaggcccagctattcgggaagctgagacaggagaatctcttgaacctgggaagcagaggtggcagtgagctgatattgcaccagtgcactccagtctgggaggttgcagtgagctgagatcatgccactgcactccagcctgggtgacagagtgagactctgtctcaaaaaaaaaatacaaaatacaaaataacttttgtatttttagtagggacagggtttcaccatgtcggccagggtggtctggaactcctgacctcaagtgatccacccacctcggtctcccaaagtgctgggattacaggcatgagccactgcgcccagcctgttccactaatattgagtttgagcttgggacttgatttgtccaatgaaatgttagcagacgtgatcagtgcagtagattgaagtgctgatgtggacggcttgccctcttgcccatctgccttctgctatgaataggatgtgccttgactaaccacaagtccaactgaggtaaaagactggtaggatttgttttctggccataaccatgctgaccaaaacaaacaggatttcgtccagacaggataaagtaaagaaaccagtgaaaaccagcagatgatgaccagggtgattcttggctgccctcgtcgctcaatagcataaggcactcccaccagctccatcacagtttacaaatgccatagcaatgacctggaagttatcacttttccatggcagtgacctggaaggtactgcccctttcctggagagttctaaataatctgccccctcactctgcattaaccaaccccttaactgacatgtgattgaaagtgggtataagtgggtataaatacagttaccaagagctcatatgttgccgactctgggcacactgcctatgagtcacccctgctctgcaaagagcagtaccgttccagaaaagattgctgtttagcaccaccggcctgcccttgaattatctcctgggcaaagacaagaaccctcctgggctaagcctcaacgttggggttcgcctgtcctacatcacaatgaggatggaatcccacagagcaggcctggacctgcttgcagcatgaagcctactccagctgggcctagaaaagatcagccaaaccctcattgacccacaggcaaatgagtaagaaataaatgctcacttttgcatgccattgagttttggaattatttgttaagcaataatagttgactaattcaagggagcaggcttccctttcttcccacattctccctagctgtccttttgaatattaaatcggcagcaattaacactactgatcctcccacaagaagaaaataaacttggagtagatttgccaggaatggggggtcccttacatggagccacattcattatcttgcccaggctccccagcaaacagccttaccttattaattatcaatatggttatacatagagcaaagctagttcagctgttcgagccaattggccaaatccaggcccaatgctggaggcttggcctccttaatatgtgtaaccaggctgggcatggtggctcacacctgtaatcccagcactttgggaggctgaggcatgaggatcacttgagcccaggagtttgagaccagcctgggcaacatggttagactctatttctaaaaaaaaaaaaaaagaaaagaaaaaaaatgttttaaatagctgggagtggtggcacctgcatggccacagctactcaggaggctgaggtgggaggattgctggaacccgggagttcgagatcagcctggacaacatagtgagactccgtctctacaaaaaaaaaaaaaaaaaaaaattagcatggtatggtggtgcacacctgtgctcccagctacttgagaggctagggtggtaggatagcttgagcccaggatgtcaaggctgcagtgagctgtggtagtaccactgcactccagcctcggcgacagagtgagaccttatctcaaataaaataaagttcgaactagctggtaacagagatcatcctggcacactcagaatgctgtgcagtcacccatccttaggaatccatccatcccaaggcgccgtccagctgcagaggtgctagatcaaaagtaagtgcttctaaaaggtctcggagagtggagggcaagggctgagttctcagaaacattcttgccttgtctgacatcaggcagcttctcctcaccccctccctggccacactccttcctcacctgtctcctcgccccatcccagcccttctctgcaatgcctcttccctcagcttaccccctgtcatggtcctaatcaattccccagccaaaaaaaaatgtgttcgtccagagagttgaatcctcaaatcacccagataatcaatattcgactactgtgctacagagcaggagatcgatttgctgccagccattgccaggcaactggaaactttcatgccatccccctccgacgaaggcaccgtggatagtggggcagcactgcggggctgggttttagggatcagtggtgtgcaaatgcagtggaccgtagggagaagagagggtcttgctgctttcttttttaaaaaaataaaacaggatctcactctgtcacccagcctggagtgcagtggcatgatcatagctctctgcagcctcaatttcctgggctcaagtgattctcccacctcagcctcccaagtagctgggacttgacaggcatgggccactgtgactggctaatttttttttttgcagagactgggtctcaccgtgttgcccgggctggtctcgaattcctgggctcaagtgatcatccgccttggcctctcaaaaggctgggattataggcgtgagctgccatgcccggccttcctgctgctttcaagacttcagtgatgttccatccaacattctggcttgaggaaaatcacttgtttaaaaatcctttttactatagaaaatttcaaatatttgctcagagggatactataatgaaaatccatgtactcattacctagctttaacaattatcaaccatgggtgaatttggttttattctaccagtccctctctgccatcggattatagttgagcaaatcttcaacatcattcatagatatttcagtatgtatctctgaaagagaagaaatctcttttttcataaatatttcagcatttatttgcaaacctacgatgccattcggtacctggtttaatataaaaatttagttgtgttttttatttttatatttttgagacagggtctcactctgtcacccaggctgaagtgcagtggcaccatcctagctcactgcagccttgacctcctgggcccaagtcatcctcctgccacagcctccccagtagcttggactacaggtgtgcaccaccatgcctggttaattttttaaaagttttttgtagagatgaggtctcactatgttgcccaggctgtaaaaaggctagtttttttttttaaaaaaaaatcttattctcttattttaattgcaaaagtaatacacactcatactaaataaaacaatacagaaatatataagaaggaatcttaaaaaacaaaaaaccacaacatcattatcatactttcaagaaattaatctttgtttctccatagcatcaaatatccagtcagtgttcaaacttccctaaataccttaattttttaaagttttcttttaatcgggaatcaaacaaatttcaaacattcagctgggcatggtggctcacacctgtaatcccagaactttgggaagccaaggtgggcagaacacttgaggtcaggagtttgaggccagcctggctaacacggtgaaaccccgtctctactaaaaatacaaaaaattagccagatgtgatcttggctactcaggaggctgaggcaggaagatcgcttaaaccctggaggcagaggttgcagtgagccaagatcacaccactgcacaccagcctgggcaacagactgagattctgccaacaaacaaacaaataaaaaaaacattgtaattggttggtatgtttcttaggtttcttttaatctgccagtttcccttgcagtttatctcttgaaaaggaggatcactggttctgtggagaatcccgcagcccaaatcttacaccccgtggtggggtttagcacgtgcctccatctcctgcactgccagaaggtttccatggattggaaattggaccaagcagcttggtcagattcaggtttgacatagtggtaagactactttcttagccattttcatcaggtgtctagaatgcctggcctcacatgtttattgaaggaggagaagaaaggctactttggagaaacccatagatccattttccaagtctgactaaccaagattcttcagaggtgctgagggatttatctgatgacaaaaaaaaatatctatatcaataattaatctcgaagtgtccttgttgcagccagtgataagagaaagctgcacagtgcctgagtctagcagatctgcggagaccactctgggacaaaatacataaacactagtaaattacttcaaagcttttctcttttttaattaactggagtaattttgtaataatccccatggcttgtgtcttaaaatgcaagtcagttaaggatcgaatccatcctcccacggcgtttctctagttctggggctcagaccacgagggctcaaccccgcgggatggcggtgactcaagggctttcataaaacacacagaactttccggcttcactccagcctcggcagatggtaacaagtgtcagaagcattcaattagcccctgcatttgctcatgatttaacaagctccgtctagtggcatacctgtgatatgtggagctgcagagacgtaagcttctgaaggactctataaaaagctttttgagaatgatgggtttgagtatttcaagttcccagactgccgtaaaaggcaaaggccaggctcccccattcctcttgactgtgtgctcacacagcaaattgagcttccaaaggcaattaattccacaatcctcaattccacaggggatcatgggctgtgcacacagcttcatagaaccactgagccagggggactttgccctatatagaaacccttgtgtttatacaccttggaaatgcttttcaaagccaattcgctcacattgtcatgttggagcctcacaaaatcctgttaagtagaacagttattatcccatttgatgtatttaaaaaaaaaaaaacaaaccatccaaagtctgaggtcaacagggagggagtgatgacgtccattcagaacccatccgcctccattctgagcctctggtgcaggctccggccagcacggccccagcaggaggtcccaaaggcagtcctgtaaccttcatccaggaattacgggggctccaccgtgcctggcatttaaccattcattcagggagagcaaatccaacagttcacgaggaccatcctgggatgctgtcgtctggatggtcaggaagtgaaatacaggccctgtggccttgctgcaagcctcggtcctccctggacctggaggccactggatgtgtgtccccttcgtgggagagctccgtccacctggagacagtaaccacgctatgtccagccacccagcaggacctctccaggaggacaaacccgcattcctcactgtctctccggggagaaggtgtctaccctgaacaatcatgccccatcatggtatatatgcataggcggtgaggcattctgggctcaatctttatgtgtcccccaattccaggctgacctctcgactgtggtggacaaaggaacaaccccaggtttcttttgcaggtccccattcaggaaatgcaccctccagccccggcccttccactttgccagtggagagttttccgctgagctggaaggctgcaccctgtcacacaccaggtgtgcgaggtccagtgcgttggcagagaggatggtggaggaaatggtttggaaagaaacttagcagcagctgtggaggcagaaccaggagccgattggccaagaggcaatgttagctcccccttggctcctccaggtgaagcaagttttacatcccaaagctccatggatcacagggcgaccactctcggctggggactgcagagcgaaggtcctctgtctacctgcatgtgaaccacctggtagcttttgccccaaaacaagtaaatccagctctctggggtgagtttctaacatcagtgttttgtaatattcccctgcgaggagaatgtgaatgccagccagagttgaaaatcatccgcttggccgggtgcggtggctcatgcctgtaatcctagcactttaggagcccgaggcgggtggatcacgagatcaggagttcaagatcagcctgaccaacatggtgaaaccccgtctctactaaaaatacagaaatcagccaggcgtggtggcgggcgcctgtaatcccagctactcaggaagctgaggcaggagaatcgcttgaacccaggaggcagaggttgcagtgagccgagatcgtgccattgcactccagcctgggtgacagagcaaaactccatctcaaaaaaaaaaggaaagaaaagaaagaaaattatcgcgttagggagtccccagtgcaggggtttctcagccctcactgcaccctgggattctctgggagcttcaacaataccggctccgggacccctcttcacagatcctgatctcacagctggggtgcatggggtgcagccgggggccgggatttttgaaaggctccaggtgggtctgacattgagacaacagggccactgcactgacgctttttttttttaattgtaaaaaacaagcccctgcaaactctggcttgatctggctttgagaaagcctctctattctttcctttcttcttcttcttttttttttttttagagagagggtctagcttggactcctgggcttaagcaatcctccctagtaggtgggacctcacctggctgagtcctttctgtgtagcatctgcacacaggtaaaactgacattgaaaatctcagcaaattggcaaattaatagacaggtaacccccaggaatgacttcatttcccttgtgagtactaatactcccaaacgtggtgtggcctttaaacaccgtataaaccgctttgcagaagttcttgtttgagcatcaccagtgccacagggaagcagttattcatctcagacttctgtttcctcagctgtaaaatggagccaagtggcttgcgtgtgtttgctgggtttgggggaagccagggctccaacccaggcctctgactctgggctcaggacctctcccccttaacttgcttacgagacacactagagccacgtccaggaggaaaggtaggctgcctgggggcagaaggtggtgttttctgcagaaaaagaacatcaggggccgggcgcaatggctcatgcctgtaatcccagcactttgggaggctgaggcgggtggaccacctgaggccaggagttcaagactggtctgaccaacatggtgaaaccccgtctctactcaaaatacaaaattagccgggcatggtcatgtgtgcctgtaatcccagctactcgggaagctgaggcaggagaatcgcttgaacctgggaggtggaggttgcagtgagccaagattgtgccactgcactccagtgtctcacgcaaaaaaacaaaaaacaaaaaaacaaaaaaaaccacagggattggggataatccatggccaccgtgatggtgaggctctcccaaggctaattctcccatcccgcaagggcaagagccctttccagatgctcctgcagagatgacaaaccatgagaagggtgcttagcactgcagcaggttggttgggagggcagaggttacctgcaagacaaggccagctggggtgagccccggcaggtgcagggacagggctcctggggctgacgactggaagcctgtcctccccttgggaagcctggcactccctgacatcagggctcctgcctggctgtggctggcacttggctctggacgactgtctcttggatcacagaggggccaggatgaggactgggcagagtggggccctctacatggaaggatctcacctcccactcgctccttccatggggttgtcagaggaccgcagacccgtcctaaaggcagcacagacacagagccttaattctagtccttatatcacagtccccacccccgggatagattgtgcttttttccagagtcagaatggggacgctcagggctttattgaacgtttattgtaaataccagttttgttcttcccattagagaaggaacgtgctgtctccacgctgccgaggtggaggggcgtggggaggaagctgtccctctgctggccgtccctcccctgctctggtggctcctcggggggctcacagcacaggtccaagtcctcaatgtgccaggtgagtcctccccactggcagctcctgtcccctgccgccagcctgtcttgcatcagccacaccatgccctttagtgtcagaagctcctcggcttggggacccctgtggcttctgtcctgtagaccccacgcctagcacagtccctagcccattgcaccctgtgggtgtcgctgagtgaatgccttcacggttcctcctccctcctcttctctccacctaaaatacttgttttccagtcctccatctggaaatgtgactatgttttctcatccatacacagcgatgcaatagcgccaggctcactggccaggggagtgatacaggggggcacctggcacagtcgggcacaaggtagtcaccgcacagccaccaccacttccgtcatggtcggtatcatatagcggggcagagattgggctttggagcccagagaggcctgtgttcaaatcgactctgctctgacttgtggtgtggacttggccgcgggactgagcgcggggcctgctcaggggccagcgtcacagggaagacagtccgagcaagcatgggtcagggcgctgaggcttcctcctgcgagccaaagggaaactcagccacggggactcagggaggcctgtggggcaagtctgagcctccctctcggtggccagtgggcctctccttaggtgcctggggcaccttctcacccagcagctggctgcctggagtgggcagccccaggggctgggtggtcctagccatgtgggttggactctgtccaccattctgccctttctgctcactcaggttcctgcgaatggtgtcgggccaccgtctatatcttcttctcctgcctcaggacacagggaacctagggaactccagacaatggtcgaggactgggggagcccccagggttcctgagtctcctaggaggacagtggagcaaggatttgtgtccgcaggctggagtcaggcttgcatttgatgccctggttacctttgcagcatctgggacagagtggtgtggagatagggagggggttttgccctgggcctgcccaggtgttacttcacttccccagcactcatctgtcatgcccctcgaatccacatccgactaggaggccctcctctctggccacctttcctttctaccaacaaccccctagttctttttctctctctctgccttcgcttcctccactctctccctgccctaggatcccagctccatcctggagtcagaacctgcaggggcttcgttcctgcagagcatgctggggcttccttcccgcaggatgtgcaggggaaatcgtgatctgtcaaatccacgttcaccctctcccgatggactaggagaggaatggtgcgattccttccagaaggccttccccacgtgagatagggagaaagagagaagatagggcaaattttgtgagggaaaaaagtacaaaccactgggatagatgacagccatgttcagaggctggggagactgagagaggagaaggaggactctggggtaggtggtgtgtgtgaacacacagacagagcctgggagaggggcagtgctagggactctcaggggctggagagcagaggggacgcggctgggaaactcccagggaagcaggtgagtgggagctctggatggacgcagaggagactgtcctccaagccgggccacccacagcacccagggtggaaacagacaactcgcagctctctttccaaggtcgagaggtcacagagcagagccaggccagggccatagctctgcaggccagcaggaggagcggggcagcctccctctccaccacctcccccgtggccgcctggattgccctcggctgtgccagaatctccagcacactcagcctggcccagcccaggcctctcagggactggcctccctgcctttgcccagcctcctgaaaagcacagctggccccactcaggagcagttagcctgagggcccttcctgtcagccggtagatcactggctggctgcctcagtcaccacttggtggaggtgactgcaggtaagcaggcgcctgggagtctggctcgtgccaccatctgcatttttttgtgaatcctggagtatcttgtcacattatctctaaccagtagagaggcatgtgtgcacacgtgtgcatgcgtctgtatgctctcatctatgtgtatttgagtgtgtgtgtctacatgcacctgtgtgcatgtgtgtgtacctgtgtgtgcatctgtgtgctttgtgtgtgtgggtatgtgtgtacatgtgtgcctatgcatgtctgtgtctgcgtgtgtgtttatgtgtatgtgtgcacacatgcatccatgtatgtgtgtctatgcacgtgtgcacatgtgtctgtgcttctgtctgccagtgcacatgtatatgtctgtgcatctgtgtgtgtgcacgtgtctgtgtgtgcaagtatacacatggctctctgcgtgtgtctgtctccctgcgtgtctgtgtgtgtgcgtgcatgtgtgctcacaagctctgggcgtgggccctagtgtctgagagcagggatgagattgttttgcctcagaaagcccagggcagaaacatttcccccgcacgatcaaggccttccgtggctgctcagaacacaccgcgttcccggccgcacacgcagtcacacgggctggtgcacactcacactcaggcccgagccctcccgtcacactctttggtctcccgcaggaagcccccggagccccagcccacaggcctccattcccagcgggtaccccgggccccacgctttcctgtgaaccctacaagcgcagcctgcccgcccctcgctggctgccttcagggagcccccggaaagccgggccggggagctggcagggacaccccaggtctctgcgtcctgccttcccgcgccctcagcagcccaagccggggctccagcagggagagcaaatgttgtctgcagaaggcgccaggcctccccagctcccccaaggcctattgcgagcccaggcacaggaaaattgttccaagcgcgctcctcatccttgtcttcagccctgttggcactacccggtgtcagggatgcctccctgccctcgctatgagaacatcattttccttctttttcaggcccacgaaggagctcctcgcggtgccgggagcgccccctcgtggcgaagccgcgcaggcacagtgtctgggacacctggggtccaggtgccttcccaacacctgaaaggcgggatgggaggcgggggcagatgttcacccgcttctgtccctactgatcttcctccccccggagtcccgggtgttgagggaagaaacctgcacttggatgcttttcaccgagctgagcccttggatacctggaaacacaatacctccctgggactaatgccatcctcagggctcactctggatccggctatacctgttgcagcagcaattctctgggaacacttcagagccctctttacagattgtttagattgggtggggataagctgggcatggtggctcacgcctgtaatcccagcactttgggagcctgaagcaggaggattacttaaacccaggagtttgagaccagcctgggcaacataatgagaccccatctctaccaaaaaaaaaaaaaaatagctggacttggtggcatgtacctgtagtcccagctactcaggaggcagaggcgggaggtcgaggctgcaaggagccagggttgtgccactgcactccagcttgggtgatagcgcaagaccctgtctcaaaaatcaaaataaaagctgggggccaggtgcggtggctcactcctgtaatcccagcactttggcaggctgaggcgggcggatcacgaggtgaggagatagagaccatcctggccaacacggtgaaaccccatctctactacaaatacaaaaaattagccgggcgtggtggcaggcgcctgtagtcccagctactcgggaggctgaggcaggagaatggtgtgaacccgggagatggagcttgcagtgagccgagatcgcgccaatgcactccagcctgggcgacagagcgagactccatctcaaaaaaaaaaaaaaaaaaaaaaaaaaatggtgggcgcggtggctcacgcctgtaatcccagcactcttggaggccgagatgggcagatcacctgaggttaggagtttgagaccagcctggccaacatggcaaaactctgtctctactaaaaatacaaaaattagctgggtgtggtggcccatgtctataatctcagctacttgggaggctgaggcaggagaatcgcttgaacccaggaggcagaggttgcagtgagccaagatcatgccactggactccagcctgggcgacagagcaagactccatgtttaaaataaataaatttttaaaaataaaaataaaaagattgggtgaggatcttgtgtggtggtgggcggttgggggggcgggggggcagttctcaccccatccagagcaggcaccagggacagaaagtgtgaccctacaatttgtggaaccagctcctgtcaaactctctttgtcctctcagaggcagaggaaggacagaaagaaagaagatcatttgtctttaaaatttttccaatgataaacagaaatcattatagtgagagccaacgtctgtatagcatgtcccatgtggcaagccctgttctaaatctttcagacacattaacttattgaatcctcccaacattttcaatgtggaaaactggtaaaacacaaaattacaaggaaggaaaataaaacccacagttctatcatgcattccctgccagttcttcatctatgcatatggattttttaacaaaatagtgatggtgccgcacagtacacttctgcgttctgccttttctcatggcccaaggtcatttgtcttgggaaatactcttaatggctgctttgtattctgtcttcggaatgtactgtcatttatttgaccattctgggggaaacttctgcttttactacaaaaagcctgtgtgttgggagctcgaagggcttgtttcactccagcctctgagcctgctgtgtgttcacaatggtgtaggagcagtgacagtttcctaaacccccgtctgtgggaatctcaggtgtgtgtgttacctatgtgtgcaagtgcctgcgtgaatgtgtgtgtgtttcccgtgcttagacttgccgtataagtactcatacttcctaggaatctgtccaaaagaattgaaaacaataggccaggcatggtggctcacacctgcaatctcagcactttgggaggccaaggcggtaggattgctgaggccagaagttcgagaccagcgaggccagaagttcgagaccagcctggccaacatgactaaacgccatctctactacaaacacaaaaattagctgggcgtggtggcgtgtgcctgtagttttagctatttgggaggctgaggcaggagaattgcttgaactctggagatggaggtggcagtgagccgagatcgcaccactgcgctccagcctgggtgacacagtgagattccatctcaaaagaaaaaaaaaggaattaaaaacaatagaaacagctgggcacagtggctcacacctgtaatcccaggactttgggaagccaaggcgggtggatcacatgaggccaagagttcaagaccagcctgggcaacatggtgaaaccctgtctctactaaattacaaaaattagctgggcatggtggtgtgtgcctgttgtcccagctagtcaggaggctgaggcaggagaatcacttgaaccagagaggcagaggttccagtgagccgagattgagccactgcactcaggcctgggcgacagagtgagactatgtctcagaaaaaaaaaagaaacaaatacatgtaatatatatgtaataaccaaaaggcggaaacaacccaaatgtccatcaatgaataaaaagataaaatgcagtatagacacaaaacagaagcttattcagctataaaaaggagaggctgggtgcagtggctcacacctgtaatcccagcactttgagaggctgaggtgggcagatcacgaggtcaggagatcaagaagagcctggccaacatggtgaaaccccgtctctactaaaatacaaaaattagccgggtgtggtggcgcgtgcctgtaattccggctactcaggaggctgaggcaggagaatggcttgaaccagggagttggaggttatggtgagccaagatcatgccactgcactccggcctggcaatagggtgagactccgtccccctcacccccccaaaaaagagaaaaagatggttaatgttttttatacagagacagagtcttactctgtcactcaggctggagtgcagaggtgcaatctcagctcactgcagcctcgagctcctgggctcaatcatcaatcctcctaccttagcctcccaaagtgctgggattacaggtgtgagccaccgtgcctggcccaagagggctaattttatgttatgtaagttttgcctgaatttaaaaaaaaaagtcatactaatggcatctatcaagccaggctttcacacaaaatagccctttatagtcaaattattattatttttttagagacaggttctcactctgtcacccaggctggagtgcagtgtcgtgatcatggatcactcgaatcttgacctcctgggctcaactgatcctcccgcctcagcctccggagtagctaggaccacaggtgtgcaccacagcacctggctaattttaaaatattttctagagacaggatctcactatgttgcccagactggtcccaaactcttgacttcaagcgattctcccgcttgttcgtgtcccaaaatgttgggataatgggcgggagccagtgtggccactgatggtccaattctttcttcctcttttgctgcccgtctctcacagcctgccccttagcctccgactgtgaagtttagacccgaattggtcacacggcacctgttctcatcatcccattctctccccttccttcgcttggtccataatctgtatttgtcagagaaaggacttcagttgccgtggggatctgaatggactttgctgaggattttggaccttatttttatttttcagaccatgtctaaaagaaacaaacggccccaaggcagggtttgggtggcagccaagctactgtgaggttcagctctcctgctcacgcaggacaaagggatgcacacacgggtggagaaacatgggggtactttttgcaatggatgtgggaaagggaaccaccaagactgttattggctgggcacggtgactcacgcctgtaatctcaacactttgggaggccgaggtgggcggataacttgaagtcaggagttcgagactagcctggccaacatggtgaaaccctgtctctactaaaaatacaaaaattagccgggtttggtggcgcacacctgtaatcccagctactggggagactgaggcaggagaatcacttgaatccgggaggtggaggttgcagtgagccaagatagcaccactgcactccagcctgggcgacagagcaagactccatctcaaaaaaaaagaaaaaaagacttctatttggtggcctgtttgccttccccattacactttcactgtgagctcatcaagggctgggacagtgttcttcactccatttctccaatgcctgggtcgtatcacggacttggcacatgggaggaacctcgtcagtgtttcatgagtgagtgaagcccactcagcgtttgatgatggatgaatgtttggattcattaacgaatgtgaatcacacctcaagccgagctccacattagattcacctggggagcttatcaacagccctgtgatggctgcacctaaaagcaattaattctgaatctaggggtagggatggggcccaggccttaggatttttttttttttgagacggagtttcgctcttgttgaccaggctggagtccagtagcgtagtctcagctcagtgcaatctctgcctcccagcttcaagcaattctcctgcctcagcctcccgagtagctgggattacaggcacccaccaccatgcccggctaatttttgtatttttagtagtgatggggtttctccatgttggccaggctggtgtcgaactgctgacctcaagtgatctgcccacctcggcctcccaaagtgctgggattacaggcgtgagccactgtgcctggcccaggcttcaggatttttaagagcctcccaggtgatctcaaggtgcagccaaggttgagaaccactcacagacagaatgggacatctgggaccttaaaatttcacactaacatttagacaccgaagtccatgcagaggacatggaaaccaaatagaaactaacaagaaagacacgaaaaacgacggaagctgtgaatcagggcataaagatacaagatattgagatcatacataaagaaccagcgggcatggaaccgagggaagggctagcgcctgtcccgtgggccagcacttgctaagagcctgttttgttcatgacactcccaggagctgtgctgtctcagtgaagagcattacttaggaaaatcccattcttcccccttgacatctcaatgacttggctcctgcccaaaccccctgctcagggtggctctggcctttgtttttctcagatttggtctaaacagtgaggttctggcgccagctcggacaggctcccaaggctgttcaagtttcaggacgttggcaaaccaattgttccatgggaccattatttaaaaataaattatgtaaacttagagttacatcaattacataaaaagatagtagatgctcaaaacatcactactaattattttactacattttactgctatctatgctcttttaaaaattttaagtggggacagtttcattttttttactttattttatttatttatttatttattgagatggaattttgcctttgttgcccaggctggagtgcagtggcaccatctcggctcactgcaacctccgcctctcgggttcaagtgattctcctgcctcagcctcctgagtagctgggattacaggcctgcgccaccacgcccggctaattttgtatttttagtagagacgaggtttctccatgttgttcaggctggtctcgaactcccgacctcaggtgatctgcccgcctcagcctcccaaagtgctggattacaggcatgagccaccatgtctggcctgtttatttagtttttgagacaagatcttgctctgttgcccaggctggagagcagtggtgggatcatagctcactgagggctgggtgtgatggctcacgcccctaatcccagcactttgggaggctgaggcgggtggatcatttgaggtcaggagttcaagaccagcctggccaacatggtaaaacccgtctctactaaaaatacaaaaaattagctgggtagggtgctgcacacctgtaatcccagctactggggaagctgaggcaggagaatggcttgaacctggaagggggaggttgcagtgagctgagatcacacgactgcactccagcctgggcgacagagtgagactccacctcaaaataaataaataaataaacaaacacatatatacatacatacatacatacatacatacatacatacatacatacatacatagctccttgtggcttcgagcttccagactcctgcctgagcctctggagtggctgcgattacaggctcaaaaggtcctcggctccagccatcttgcttcggtcagacctgcatcaaatcccagtctttcccatcctttctcagttggtgacacattgatgaacttcctatatgatcaggatccaccagggatggcgcacagctgcaatagagcagtatctgtcaattgccattgaaccccaaggccaaccctgcctgttgaagtgtgtgtcacttggatgctggggagaaattgtgctttatctgtaaagctggaacacctttcctctaaacagcaaatgattgttcacgatacccaattatttctttctaaataattatttttttctaatttacttttgaagcataatgtacatacattgacatgtacatatcttttgttgttgttgttgttgttgagatggagtctcaggccgggcgaggtggctcacgcctgtaatcccagcactttgggaggccgaggcgggcggatcacgaggtcaggagatcgagaccatcctagctaacatggtgaaaccctgtctgtactaaaaaatacaaaaaattagccgggcgtggtggcgggcgcctgtagtcccagctactcgggaggctgaggcaggagaatggcgtgaacccgggaggcagagcttgcagtgagccgagattgcgccactgcactccagcctgggcgacagagccagactccgtctcaaaaaaaaaaaaaaaaaaaaaagaatcgcctgaacccaggaggtagaggttgcagtgagctgagatcatgccactgcattccagcctaagggacagaatgaaactccgtcttgaaaaaaaaaaaaaccgggtgcagtggctcacacctgtaatcccagcactttgggaggctgaggcgggcagatcacttaaggtcagcagttcaagaccagtctgaccaacaaggtgaaaccgtgtctctactaaaaatacagaaaatacaaaaattcgccaggtgtggtggcatgagcctgtaatcccagctactcaggaggctgaggcacaagaatcacctgaaccccagaggtggaggctgcagtgagccaagatcgtgccactgcactccagcctgggcaacagagcgagactctgtctcaaaaaaaaaaaaaagaaaaaaaaaagaaacagggtcttgccgtgtcatccaggctggagtgcagtgattcaaacatggctcattgcagcgtcgatctcctgggctcaagcagtattcctgtctcagcctcctgagtagctgggactacaggcactgacaccacagccagctaatttttttatttatatttttagtagagatggggtctcgctgtgttgcccaggctgacgttgtacttttggtctcaagtgattctcctgccttggccttccaaactgctgggattacaggtgtgagccaccatgcctggctggcttctagattttgaatctctatgttggaattcaaaataaacttcgtttggccaagcaattattctctgcctgtcttcctctggctccaggtttcaaagacccctgaggacagagaacttcaaaaggacctctgaattttgaccctcaggcctcaccttggcactaaggcagagagtgacaggccctgaggggagggccagcgatcagacagctttgtctaggacatgggattggagaaaagtcatgatatgtgagtatagtaatttcctgttgctactgtaacaaattggccacaacttcagcagcttaaaacaacacaaatgtattaattagttcacaggtcggaagtccaggttggcttggctagtttctctgatccaggttttataaggtcaaagtcaaagtgtcagccaggctgggttcttatcaggaggttctaagaagaatccatttccaacaccatcagttccttgaagtggcaggatggggatcctctctgtgctggctgtgagccggggtcactctgtcctagacgtaggcaagcaagcccagccgcaaagaaccccgctgcactttacttaaactacagcttcccaacccattttagccatggagctcttttttcacataacctctctctctctctctcttttatttatttatttatttttttgagacaaggtcttgctctgtcccccaggctggagtgcaggggtgtgatcacagttcactgtggcctcccaggctcaagcaatcttcctgcttcagcctcccatgtagctgggaccacaggcacgcgtcaccacacccagctaatttttatattttttgtagagatggggtctcgccatgttgcacaggttggtcacaaactcctgggctcaagcaatctgccctcctcagcctcccaaagtgctgagattataggcgtgagccaccacgcccagcccataatcttttttttttttttttccaagatggagtctcgctcttgtcgcccaggctggagtgcaatggcacaatctcagctcactgcaacctctgcctcccgggctcaagcgattcttctgcctcagcctccagagtagctgagattacaggtacctgccagcacgcctggctcatgtttgtatttttagtagagatgtggttttgccatgttggccaggctggtattgaacttccgacctcaagtgatttgcctgcctcgacgtcctgaagtgctgggattacaggtgtaagccattgcgcccagcccataatctttcctaaggttccgaaagatattaatatttggggaaaagtgaaatgggagcttgtgcaatttttgtatccctaaagtttcattgcttcctctaaactctttctcacgacaattttagctccccttctcttgtcctaaggtttggcttttgcacagctggagggcatttcttgtacagggtgggctaaccaggcccaggtcctgcttcagccctgactccaaggctctgattcgtgacatcatgcaagtttctgagcctttctgaacttggtttcttcttcattttgtttgttatctcaagggtggttgtgagaactaaattgggcaatgcacgcaaaatgcttggcccatcatttgcgattgataaatgttactcatcattatgggtttttttttaagaactaaaaagtcttcactaaccttcccctttgcctttttatcgctgtcaacatcaggtaccaagagcctgtgaagcatcttacaaggtggctgcaattttggctcagggaaactagatgtggccagacttgcacataaatgacaatggatgcttctcccaaagtttccaaaaatctggatgaactaacccagaaggatcctgtctgaataaagaacactgctccaagtgaccaggaggcctcgatctctttctgcacttatggagagggaaggctgtgcagaaagctgcccgtggaagggacacacaggtccctaatctgacccataagcatcccacccaccccagggacccactgcaacctgctgctgtggctccccacacacctccctgggcctccttgacctgacaggtgagcactgcctgacccagcagcctctggccaggtagcccctgtggggaagagctgcagttctggacagctgcctgcttcaaaatggagagcccaggtggcctccccaagggcaccttcttcctctttctaagtcagagccagctaagatgaatttctcttgtacatggtgggcaaaccagacccagggccagttttgggctctgtgtccaagacactgatttgtgacatcaggtaagcctctgaacatttctgaacttggtttcttcttcacgtgaaagctcctgggctttcaaacctccatcctccctgaatagtgacttttgcccctgccttgtccctcacagacacagctggctgcggcgtcctccctttcccctcccaagggggccgccctgcctctgcccaccatgggcatgtggccattgccgctggtttagacttggtccagcctcagtcttgactgccatctagtggctcccagactcctgctgggattcaagttctctggtgagaactaaactgatttttgtatcttgcccaaattcctaaggggtctgggagtcatgacctataaatcaaaaattctcatcagatgggttttatttaaccctatatattgtgatttactttccaacctgactctggcataacattacgagacaaggaagaaaatcaaaatactttaccccaaaacatgtttctttgccatatcttgaaatggccctgcaaagctgtcctttgtgggggaaaatttgcatctgtaaagaatctctattaacatagctagctctttttcttccaggccctcccaatccgaaacagattaactaaagcatcttttaggtccggcgggcatgatggctcacacctgtaatcccagcactttgggagaccgaggcaggcagagcccttgaggtcaggagttcaagacaaggctggccaacatggtgaaaccccgtctctactaaaaatacaaaaattagctggacgtggtggtgcacgcctgtaatcccagctactcaggaggctgaggcaggagaatcgcttgaacctgggaggtggagtttgcagtgagctgagatcgcgtcactgcactccagcctgggcaacagagactccgtctcaaaaaaacaaaacaaaaaaaccaaacactatttgttagatttagggcccacctttagcatgacctcgttgtgaacccagaagtacctgagagacatctcaatcaatttggaaagtttattttgccaaggttaaggacgcacccgtgacacagcctcagggggtcctgacagcatgtgcccaaggtggctggggcacagcttggttttacacattttaggaagacatgagacatcaatcaatatgtgtaagatgtatgttgattcgatctggaaaggtgggacaacttgaagcaaggggcttcctgattataggcagataagagagaaacagttgcattcttttagcctctgattagccacctgattactgcatacaccatttacctgtgagagtagtgtaacggaatggtcacttataccagcgtccagcctggctcagtgaaacgatggcggcaaggaagcagatatgcgtttgcctcaggtgagcagagggtgactttgagttctgtttgtcctttgtctaccgaattttcgtgtgggaaaattgtgagagaggtgtgtagcttttttttttttttttttttttttaaatctttgcagttcccagcctttggcttagtgatttcagggtcccaagatgtatttgccttttacatcatctttttctttctttctttctttctttttttttttttttgaaacaaagtctcactctgttgcccaggctggagtgtagtggtatgatctcagctcactgcaacctccgcctcccaggttcaagcgattctcctgcttcagcctcctgagtagctgggattacaggcttgcgccaccacatccagctaattttttatatttttggtagagatggggttttaccatgtggccaggctagtctggaactcctgacctcaagtgatctgaccaccttggcctcccaaagtgctgggattacaggcgtgagccactgtgcccagcctacatcatcttcattacagctgcaaagacccttttaccaagtaagtcacatttacaggtaccagcgattaggacttgaacatatcttttggaggatactgttcagcccaaatcagccctaaaagacagaccactcaagcccctcagctgagtggcacctcctcttgggcagtggatacgggagaagatgctctcacactggcctctgagggaccagtgtccagacaattattctgagtgtgaaagaatgttctagaaagccaggctgtcttgggtaaagtggttagccttaaatatgtaaaggaaatgtttaccagattagctccagagcccctgggaagacaacagccaggcagtcagggatgtgctggccaggggaagatgttggattcatccagggcattggggatagccagagcagggccccacagtctggaggatctggtgctgaatgagcagtaccagagggaaggctgctgtcccctccccagtctcccggcctgctgcatcccaacaggtatgagtcaggtgggtggggtggatgctagaagaagcatgagaaatcttggccgagtaaagctcaccctgtttcaacctcatctctcttaaaccaaggtcatgctcagccacactggggaaactgaggcagccttctgcactctccagaccacaggggctttttcaataactgtttggtttcctgtggctgccataacaaagtaacaataactgagtagcttacacaacagaaatttcttctgtcaccactctggaggccagaagtccaagatcaaggtgtcagcagggttggttccttccacggtttctgagggaggcagctgctccccgactctctctttggcttatagatggcatcttctccctgtgtctctgcacatcagcttccctttatgtgtataactgtgtcaaaattttacttttttttttttttttgagacagagtctccctctgtcccccaggctggagtgcagtggcatgatcttggctcactgcaaccttcgcctcccaggttcaagcgagtctcttgcctcagcctcccaagtagatggaattacaggaggctgccaccacacccagctaatttttgtatttttagtagagacagggtttcaccatgttggccaggctggtcttgaacccctgacctcaagtaatccacccgtctcggcctcccaaagtgctgggattacagtgtgaggtacagtgcctggcccaaattttacttttttttttttttttttttttagacagagtctcgctctgtcgcccaggctggagtgcagtggtgcgatctcggctcactgcaagctccgcctcccgggttcacgccgccattctcctgcctcagcctcccgtgtagctgggactacaggtacccgccaccacgcccggctaattttttgtatttttagtagagacagggtttcaccatgttagccaggatggtctcgatctcctgaccttgtgatccgcccacctcggcctcccaaagtgctgggattacaggcgtgagccaccacgcccggcctaattttactttttataaggaaactggtctttggattagagctcatcttgatgacctcatcttaacttgattacttctgcaaagaccctatttccaaataagggcaagttctgaggtcctgagggttaggacttcaacatatgaaagacagcaagtgacaccttttctctgatgagaactgaccaggaaggtacaggtgctgccctccagccaagcaccacaccgtcagacaggccttccacgaggctctcatgaaatgctgatctgtgagaatgttccaggcaaattaaatatccagcaccgaagaagccaagtggcttggaaaaatgcatgtaaggcttcagaaaagacggagcagttggacagacaagtgagacagcgctaattggcagccacgttttgttttctccccacagctgcctcatgaaattgtcaaacaaccgtacatgttgaagccgtgaaattaaagacgttaaaaaaacgggctaatgttctcagagaccacgctttaaagacagcttttgttccatattctgggttttctcaatcagcagaaaacactgtgtctccaactgacaggggcacaaagagataagagggagacaccgtcatgaacatttctagagcaattttctcttctatcttatcactgccttcaagacacattattttcatctgaagtgtggttccaatttggggagtaaaaaagccttttcgtctctctcattcctcttttttttttttttttttttcctctctgtctcctgagggaagctttggggaagaacgttcctccactctccatggttttggaatcccataaaatatgccaatgactggagtgttttggattgataaacgcctttccaacccaccatgcggctccagtacaagctgtcatggctactatgcaaacctggtgcggggatgaccaacgtggctcacagaaagcaggtgggagatgcagacatgaagaggagcctgtctgccactctctttccccactcctcccacctcccgaaagctgagggtgctaagggctgggcagatagctgtgggggtcccatgtatgccatttttttttttttttttttgagatggagtcttgctctgtcacccgggctggagtgcaatggtatgacctcagctcactgcaattgtgagcttcccaggttcaagtgattctcctgcctcagcctcctgagtagctgggattataagcacgcaccaccgcacccggctaatttttgtgtttttagtagatatggggtttcaccatgttggccaggctagtctggaacgcctgaccttatgatccgcccgcctgggcctcccaaagtgctgggattacaggcgtgagccaccgcgcccggcctccatgtgcgctttatccaccattcccttctcaggcattcctcgctttctcaaagccaaggcctgcatttgtgttttcatccgcccatcaccagtgacatctgtgaagccagctttatcattctggcttcagaagcgccttgttctttgagtactttaaaaacagaagtggagggcccggaggccaaaccttccctgttctttttcgtatctgcccctgcaaaaccggataaaggagatttcaagagcaatttggtgggtgacagcaacggccagcctcagggatggtctgagctcctgggacctggaggccacccaaactacttgggcagatgaagacaagatcaagataactgactgcaacctggagaaagcacttctcacagaatagaaaaaaaaaaagattctgggtcctcttcttgttaggctttcttcagatggctcttgagatccaccttgatggagtggttctatcttcccttccccttctctcccctttctttcccttctccttcttttttcttttctccttccttctttccttccttccttccttcttctttccttccttccttccttcttctttccttccttccttccttcttctttccttccttccttccttcttctttccttccttccttcattcctttctttctctctctctctttctttctttctctctccttccttccttgctgttctgcaaatggagcaggttctatctttctgactttgcctgaaaggactgaagcaagtgaacactagggataacattttttccttgagtaaaatcaccctagaaggaagataactgtggttacatctaactcaggggagttccagaaataaatagtgcatgctggacttaagtgtgtccttgaaaatagccatgacactgagcttttctttctttctctcccctctttccttttccttcctttcttaagcaaaagtgtgaaaccagcttgtgacattttcccactggcaggggagctagggagatggggtgaagggaaaacatgaggattgtaatcaaatgtttaactggtttattgagcaatctcagactcaggggatataaacataaaatggttttatattttctctaatcaatgccttcagccacactctgtcaaattccactttctatctccaaatgacattttaagcagatcctatatttttttctgatcattttcagttattagaaagctttccagttttaaaccacaaccccatgtctaattcaaagctctgaggtcccattccccctgcagcagcccagctgtggctctgagataagaatggaggtgctctccatctctctctgaggctctggtaccacctgcccccgggtggtctccatggagatggtgtgcccatcactccccacccgccatgtttcctggagtgatgtttagactgacactggacttctccattactgaagataccttcagaaagggatgtccagccaggtgcgtggctcacgcctgtaatcccaacactttaggaggctgaggcaggtggatcacctgaggtcaggagttcgagaccagcctggccagcatggtgaaaccgcatctttcctaaaaattagctgggcatggtggcaggtgcctgtaatcccagctactcaggaggctgatgcaggagaatcgcttgaacccaggaggcggaggtggcagtgagctgagatcacgccattgccctccagcctgggtaacaagagcaaaactctgtcaaaaagaaagaaaaagaaagaaaaagagaagaaaagaaaagtaaagaaaagaaaagaaaagggatgtccatatttcccttcaagctctgccagtggtccatgcccttaccaccttctctgggtgagatgtccctcactgagggcaccctgggcgggtcacggctcctgcttccctttggtatcatggtcgttcacacggagccacaggtatcaatgaggtcctctgcaatgttttctaagtgctgtaaacatatgggtgggggactccctatccttttctcctgggcaattgcatcacagtccctacctgcgcagccatcaccagctgctccagtcggattctttcaagatgggaagcagaccccggtctctacgctcacatatacactatactcctgggaacccaggccaagctcctgggcacaccttctccataccccaggctgtcctgagagcaggaacaaaggagactgcagacttggcagctctgtaagcatctggcagggagtgagctgcccatggcctctgcttgccggcacccccagtcttgaagagttatcttcctggagccccacttgtttgacttggctgagagggaaacacagcctcagtcgacttaggtttgggggaagaactcctgtcccctccctctactagaatgacagtatgtagaataacaccataatatattaaacatctataattaaaacaattcctgtacatgatttcatttacaatgagaatattctactgttacctccatcttatgataagaaagttgagatttagccagacatggtggctaacacttataatcccagcactttgggaggccaaggcgggcagatcacctgaggtcaggagttcgagaccagcctggccaacatgatgaaaccccatctctactaaaaatacaaaaattagccccacatagtggcacgtgcctgtaatcccagctactcgggagtccaaagcaggagaatcgcttgaatccgggaggtggaatttgcagggagctgagatcgtgctgtggcactccagcctggacaacagagtgagatcagtctcaaaaaaaaaaaaaaaagaaagaaaaacagaaggaaacttgagatttagggggggataagtaatttgttcaagattgcacaaacagaagggtatattagtcagttttgctctgtaacagagaaacctcacacatctcaatggcttacagcaagtctgggcaaactactgccacatctagcccactgcctacttttctgtagcccatgagctaagaatagtttatgtttttaaatggttaaaaaaagaatcaaaaaaggaatatttcccgacacaagagaattatgtgaatttccaattttagtgtccatgaataaagtcttattgggcccagccatacccatctgtttctgtgttgtctgtggctgcctttgtaccacaggggcagaattgagaaactgcagctgagactgtctggccctttacagaaaaaattatgccaacccctgtcaacatttatttttctcacgcacagctctccgggttggccgggatcatctccaggttgcaggttgggttcaggttggccccatcttcatcattctgggcccagcggccacccagggcatagtcttctcgtggcagatggaggaagcacaggagagatgagcaagaacacgtgagcccactgcaggccaggcgcgccgtcgtttcctcgctcaccacacactctgcactttctagcaagagtcactgcaagatcacgtttgggaggatgggaatttatcattcatagaccaggagggagtaaaggatgggaagtaaggatctcagggactgcagttgggggattcaggacttgaactcagggctgcctgactcaagagtctgtgtgcttgttcctctgctacatggacttctgtcctaggcaaactgttaggttaagaaaaaaagagtgggctgtgtgcagtagctcatgcctgtaatcccagcactttgagaggccaatgcgggaggattgtttgagcccaggggttcaagaccagcctgggcaacataaggagacctccttctctacaagaaatacaaaaattagctgggtgtggctgtggtcccagctactcggaaggctgagctgggaggactgcttgggctcaggaggtagaggctgcagtgaactatgatcacaccactgcactccaacctgggtgacagagcaagagcctgtatttaaaaaaaaaaaaaattgccaggtgcagtggctcaagcttgtaatcccagcactttgggaggccaaggcgggtggatcacgagataaggagttcaagaccagcctggccaagacggtgaaaccccgtctctactaaaaataaaaaaaaaattagccaggtgtggtggcgggtgcctgtaatcccagctactcaggaggctgaggcaggagaatctcttgaacccaggaggcggagcttgcagtgagccgagattgcaccactgcattccagcctgggcaacagtgagactccatcttggggaaaaaaaaaaggggccgggcacagtggctcacgcctgtaatcccagcactttgggaggctgaggcgggtggatcacaaggtcaggaaatcgagaccatcctggccaacatggtgaaacctagtctctactaaaaatacaaaaaaattagccgggcatggtggtgcatgcctgtaatcccagctcctcgggaggctgaggcaggagaatcgcttgaacccaggagtcgtaggttgcagtgagctgagattgcaccactacactccatcctggcgacagagcgagactccctctcaaaaaaaaaaaaaaaaaaaagaagaagaaaagaaaagaaaacagtgggaaaaagaaggcagagagattctcctgtcattctctacccgcaaagtctattcctggacatcctgggcatcatcccaacatatcaccatctccaagtcaccaaacaggccagcaactgtaaacaaatcaaaatggattcgaaagaccctggaaagccccagcaagtgcttgcaagagcaatatattcttcaggaatgccaccatcgataactgcatagtgatagaaagttgagcaattctgaagagcctcatttccatcacccagcaggcatccttggagaagcttctttcagagtccgactatcagtaagttatgtgtgtctggaagcccttacaaatgagcagaagaagacaggagaataaaactttacgattatgcctctgccggtttttctgcaaacacagggaggaacagacccactacagaccatagcccatcgagtgtgaaatatgaagcctcacggaagtcgggagccattaagtatttgttgtgctgactgtcaaggctagaagcagcatgggaggggatgatgaataaacgcccagccattacagcagctcgatgagcctcccgcggcccaaagttgattctccatgtcataatgaaatcaaacacttgccaggaagtcaacaggagagagaaaggagttataaaacacaggcatgcgactccttctgtagctgctgtttttaaagaaagatgcgagaagaaaagaactgtaatgaatggcacagtgacgctgacatgttgtagaatgtgctgggatggagatttttctttgcaagcatcactgagcatccaagaagctaagaaacagtagatgtagagagtctttgaagaaccacatgccctaaatatcgtacttgatgacatgtcttctgggttcaaatccctatatatattgtccttctgagtgacgctccaggtacaatcgaatttttctgggcaagtatctttgcttacatgtgtaaaggtataaaaactaccatttgggcggggcacggtggctcatgattgtgatcccagcactttgggaggctgaggcaggcgggtcacctgtggtcaggagttcaagaccagcctggccaacatggtgaaaccctgtctctacaaaaatacaaaaattagctgggcgtgatggcaggtgcctgtagtcccagctactcaggaggttgaggcaggagaatcatttgaacccgggaggcggaacttgcagtgagctgagattgagccactgcactccagcctgggtgacagagtgagactctgtctcaaaaaataaaaaaaacccacagtgaattgggtgctgatgaagtgacctgggtaatccatgctggtgacccatggggcgaggctctccagaaacatttattgagcacctcctctttccctgaccctggaccaggtgcagtgaatacagacgtcacaagacctaaccagcaggatgaagtgcaggttcccaggaccctagcgtagctggggagacagtactgtgtgatagagccacagccaggtggggtaccgggcacggagggttaaggaggaaggggcatggctctccctggagggaagccaaatggtacttttcaaaaagttgcaaacatggctttcaactataaaataaacgtgtaaataatttcattcaacttgtgaattaatgagggaaccaatgagatgtggagagcagttgaaaacagaatttgaaaatcagccatatacagatgcagttaggaatgctaggatggatttgctaatagataccaagtgggtcagtgtcctacggggcaataaaatgtaatgtttacagtcatcttttctatgggacggacaccaactgtatctctgtgggacaaaatccatttacattgttatggacaatcattatttccattttctaccatttaatgtctcccctatcagagaattaaaaaagcctggtcaggctgggtgcagtggctcatgcctgtaattctaacactatgggaggccaaggcaggcagatcacctgaagtcaggagtttgagaccagcctggccaaaatggcgaaaccccgtctctactaaagatacaaaaattagccgggcgtggtggcacatgcctgtaatcccagctactcgggaggctgaggcaggagactctcttgaacccaggaaatggaggttgcagtgagccgagatggtgccaatgcactccagcctgggcgacagagcgagactccatctctaaataaataaataaataaataaaacagcctggtcaacagaaagacagcaaacagagtcctgtgtaaacaggcaatccctgaaacccggccctgaaccccatgggaagcatgcccagaatccctcttgtccatctccaagtcttggacaatttctcctgaccggggactatcccagtctgttcacacatctgcaggaccatgtagggcacctctaatctagcacactggaatcacccagggagcttcgaaacatcctgctccccaagccacacccacacccataaaatcagaatgtcagtacttggtacccggcttcggtatctttttttttttttttttttccttgagacagagtctcactccgttacccaagctggagtgcagtggcacaattccggctcactgcaacctccacctcctggattcaagcgattctcctgccttagcctcctgagtagctaggattacaggtgcctgccaccatggccagctaatttttgtatttttagtagagacagggtttcactatgttggccaggctggtctcgaactcctgacttcaagtgatcctcccaaactgctgagattacaggtgtcagccaccacacccagctggcttcagttattttcaagctcccagatgattctgatgtgcaaacaacgttgagaaccacagctctgaggacatccaagcaggaactccaggctgtcctctaccctcctccccagccttcccacctctccctcctcctcgaaaggcttcctttgtgtcttagggggtagtcactgcagcctcttcgggctcctgaaacgtccctgctattttgcagaagtgactgatggggcagcccaagggcagctttgaaacccccttttgagtcccaggagatagcatcttgtgatttgctccacaacacggaaggaacccacagcttgagagcaacaaatgagaagaaatctatcatcctcagaaaattggctcctggctgtcccgccgagtgacagtaatcacagaggcctcttaaagtgcccggctaaataaatagttttaatagtaacgaaccagctgccagcctgaaagcttgtaatcatgatgcaggtgggctctggggctgcctgtatgtgcccgccagccccttttgcaagagcataaatccaggcaccataaggagacacttaagctcccagctggatctttgtacagaaagtataaccgaagatgtctgctttcagctgcccaggtgagtttgcagcctggggagagctgcaatcacaaaactccccaggcctcctagtctcacccaaagagcagccccagggaaatggtctgggaggataggactggccattactggaattggccagatatcctggcagccaaacccctgagcaacctgtaatcccagcaccttgggaggctgaggcaggaggatcgcctgagctcaggagtttgagaccagcctgggcaacatagcaagaccccatcttaaaacacacacacacacacagacaaacacacaacctgagtaagttgttgggccagaagccagggggtggcagttgggagttgggaggaatgtgttacaggtagaaaggaatggccagcttggagaaatggccactgggatgactttgaggacatcattgattccagcagaccatagggagcaatcagggatttggaagcttaaaatcttttttttttcttttttttttttgagatggagtctcgctctgtcacccaggctggagtgcagtggcgcgatctcggcttactgcaagctccgcctcccaggttcacgccattctcctgcctcagcctcccgagtagctgggactacaggcccccgccgccacgcccagctaattttttgtatttttactagagacagggtttcaccgtgttagtcaggatggtctcgatctcctgacctcgtgacctgcccggctcggcctcccaaagtgctgggattacaggcctgagccaccgcgcctggcctggaagcttaaaatattgaccatatttcttgtttcctgggtggcctcaagcaagtcacttagtctttctgagcctttaaaacatggccaggtgcagtggctcacacctgtaatcccagcactttgggaggctgaggtgggaggatcacctgaggtcaggagttctagaccatcctggccaacatggtgaaaccccgtctctactcaaaacacaaaaattagctgggcgtggtggcatgcacctgtaatcccattcacttgggaggctgaggcaggagagttgcttgagcccaggaggcggaggttgcagtgagctgagatcgcaccattgcactccagcctggcaacacagcgagactctgtctcaaaaataaaacaaaaacaaaacaaacaaaaaaaaacataagcacagggtgcgcgcagtggctcatgcctgtaatcctagcactttgggaggccaaggtgggtggattgtgtgagctcaggagttccagaccagcctggccaacatggtgaaacccctcctttactaaaatacaaaaaaaaaaaaaaaaattagccaggtgtggcagtgtgcgcctcccgagtaggctgaggcaggagaatcacttgaacctgggaggcgggaggcggaggttgcagtgagccgagatcacaccactgcactccagcctgggtgacagagcaagactctgtctcaaataaaaataaaaataaaaaataacaaactaaaacataagcacaacaatacctcatccctagggttgctttgaagttaaatgacatactgcacaggaaaataactagcacaaagccagatacctggccagccgaggcgatcatgccaatttcctccctcccttccttcctttatatcccaagatttcaaggattgggcttggggagacaaaagctcctagctctgcgccatccactgtggcagccatgagccccatgtggctactaagcccctgacctgcggtcagcgtgaattgagaggtgtcataagcaggaaccacacaccaatttctgacttaatacagaaaagaaagtaaaattggtctaacagtttttatatgattacatgttatgatcatatttttatctcttaaataaaataaagtttaaaaaaaattttttgagacagagtcttgctctgttgcccaggcttaagtgcaatggtgcaatcttagctcactgcaacctctgactcccaggttcaagcaattctcatacctcaacctcctgagtagctgggattacaagtgtgtgccaccatgcctggctagtttttgtatttttattagagacggggtttcatcatgtcagctaggctggtcttaaactcatggtctcaagtgatctgtccacttcagcctcccaaagtgctgggattacagatgtgagccacctgtttctttttcttttcttttctttttttgagacagagtcttgctctgtcacccaggctggagtgcagtggcatgatcttggcgcactgcaacctccatctccgaggtcaagcaattctcccgcctcagcctcctgagtagctgggattacaagcgtgtgctaccatgcctggctaatttttgtattttgagtacagatggggtttcaccaggttgcccaggttggtcttgaactcctgacctcaagtgatccacccacctcagtctcccaaagtgctggattacgggtgtgagccaccatgcgtgtccttaaaattaacatcatctgtttctttgtattgtttactgtgactaccagaaaatctaaaatgacttatgtggcctgcattatatttctattggatggggctgcccccactggaatcaaatagatccatccccaaagccatgatgcaggctcttaatggggtcccatgagcctgtgatgttgagggcttttctgaactgtgaaaaacagtgactatttaaccagggcaccccagaggctcctgtctacctccctaggagagccagcacttctcacatgacttctgagtgctttacacgtcaatcctcactgaatcctcagaaatcatgtgagattatgaattatgattcccattttacagaaaaagtaactgaggcaagaggttagtaaacttactttagaagagggagggacggagagagagaacatgcatgagtgggaaagctggagatctgggggatttgaagccagtccagtgctcacttagtgctatggcctaaatatgttccccaaaagtcatctgttggaaacttaatccttaatgcaacagtgttgtgaggtagaggctaatggattaatgttgctataaaaaggatttaagggccaggcacggtggctcatgcctgtaatcccagcactttgggaagccgaggtgggcagatcacctgagatcaggggttcaagaccagcctggccaacacagtgaaaccccacctctaccaaaaatacaaaaattagctgggtgtggtggtgcacgcctgtagtcccagctacttgggaggctgaggcaggagaatggtgtgaacctgggaggcagagcttgcagtgagccaagattgcaccactgcactccagcctgggtgacagagcgagactccgtcttaaaaaaaaaaaaaaaagacttaaagaagtgagttcccccttccatctttgcctgtgaggacacagcaggaaggccctcaccagatagtggaggcttgaacttggacttcccagcctctagaactgtgagaaataaatttccctttttttttttttttgagacagtttcgctcttgttgcccaggctggagtgcagtggtgcaatcttggctcactgcaacctctgcctcccgggttcaagcgactttcatgctttatcctcctgagtacctggattacaggagcacacccctactcccggctaatttttgtatttttagtagagacggagtttcaccatgttggccaggctggtcctgaactcctgacctcaggtgatccacctgcctgagcctcccaaagtgctgggattacaggtgtgagccaccatgcctggcctaaatttcctttctttataaataacccagtctcaggtatcctgtgatagccgcacaaaacagacgcagacacctggacagaggccctccccatggtgttccctggcacagcttggctgccctcctgcagtgctcccttgtggtacgtagttaccatggctagaggctctaacaacgtgaccttatcgagtccccatctgtaaaatggaaaactattagtggcagccacctcctgggttatatgaggactcgataaggtcacttagcatcagagggcaggggtggtgcatgagctttggcctcaaaccacaggaggctcctgcacacaggtgcctctgagagtcaggttcctgcctgacagctgtaggcacagctgcagcctgagcccagcactacccagagctatcagggccagaggaaggcctgcttcctggccctggttcctcaatgggtcctgccagccaccaccctgcagagctcaaaacgactgtggaatggttagcaccacacactgtaacccaacccccctgctctcctctgcctcccctcaaaagcattccagatgccaggcagcagccccgtggccacctctgcataggtgagcaaaacatcaggagctgccagccacaggctgccaagcctttgctgtggagggcttgtggctggccctaggactgggatgcctgttctttaaaatggggtcctgaggccggacgcagtggctcacacccatattgccagcactttaggaggctgaggtgggaggatctcttgagctcaggagtttgagaccagcaacatagtgagaccttcttgtctctactaaaataaaaattaaaaaaaaataaaataaaaaataggccaggtgcagtgactcatgcctgtaatcccaacattttgcgaggccaaggtgggtggatcacctgaggtcaggagttcgagaccagcctgaccaacatggtgaaaccccgtctctactaaatacaaaaaattagctgggcatggtggtgcatggaggctgaggcaggagaatcacttgaacccaggaggcggaggttgcagtgagctgagattgtaccattgcactccagcctgggcagcaagagcaaaactctcaaaactctgtctcaaaaaaaaaaagaaaaaaagaaaaaacattagctgggcatggtggcacgtgcctgtagtcccagctgctggggccaggggtggggttgggtgctgaagcgggaatatcccttcagcccaggagatcaagactgcagtgatccctgattgtgccactgtactccagcctgagcgatagagtgagaccgtctcaaaaaaaaaaaaaattaaagtaagtaaaacataaataaagtgggttcctgaaccatggggactttgaggaatgtcttccactagctctgcacatctgcaaactgccggcacctctcctgcccccacctgcttcctctcagccctgtgcagggggatactgtggcttttgccttgcaattagggctgccagataaaatatagaacacgggttatatttgaatttcacaaaatcaacgaagaaaacttttagcggggcgcggtggctcacacctgtaatcccagcactttgggaggctgaggcaggcggatcacttaaggtaaggagttcaagaccagcgtggccaacctggtgaaacccccatctctactaaaaatataaaaattaactaagcgtggtggcgcatgcctgtaatcctagctactcgggaggctgaggcaggagaatcgcttgaacccaggaggtgaaagttgcagtgagtcaagatcgcaccattgcactccagcctgggtgacaaagcaagactctctctcaaaaaaaaaaaaaaaaaaaaacccaaaaaaagaaagaaagaaaatgtttatataagtgtgtccctgactccctgcatacaaaattgtaacaaaactatttatttatgtattttttgagacagagtctttctgtgtcacccaggctggagtgcagttgcacaatctcagctcactgcaacctccgcctcctgggttcaagtgattctcctgcctcaacctcccgagtagctgggactacaggcgcctgctgccatactcggctaatttttgtatttttagtagagacggggtttcactgtgttggccaggctggtcttgaactcctcacctcaagtgatccaccagcctcggcctcccaaagtgttgggattacaggtgtgagccaccatgcccggcttccctatgctttcttttttgtctttttcttttctttctttctttttttttgagatggagtttcgctcttgtcacccaggctggagtgcaatggtgcgatctctgctcacggcaacctccccttcctgggttcaagcaattctcctgcctcagcctcctgagtagctgggactacaggcacccactgccacactcagctaatttttgtatttttagtagaaacagggtttcaccatgttggccagactggtcttgaactcctgacctcaggtgatccacctgctcagcctcccaaagtgctgggattataggcatgagccatcatgcctggcctctcaccacattctctctggcagcagtgccaggacctgctggcagggtctgtgatgtagcaagcatctggccaggaaggagatgtgtatctctgtttcctgcagccctcccagctccgggggattcatcctctctcgtctggggaggtgggggcaaaggttcctgctgcagacctcatcttcccgataaggctgaggatgctgacaacaccctgcctttagagagaacagccccactcaacagagaccagatgtgttcatcgaaaggtgtgtaacaaatagcccaggggacacaggatatgtcaaacaattggcaccggagagcatgtgagaagaaactgtcacctgggaccagagctggcttcaaagggcaggtgtgctctgctggagtgcggatgcgcggagtgtctgggagctgggctgggcagaatggctggagcaggggtctgtgtgggcaccaaggtgatgaaaggcggtcagatcaacagggccaggacaggtaagggtgatttgttgagttttgttttttcctaatgaagcagaaatggaaaaagagggggaaagcaatcgtgtggactctatcctgcaggtcagacaggcagccccggagaagacctgctaggtgcacggctggcttgtttctaacatcacctgtggtcagcagcgccaccaagagccaccaccagggggcagaggtagggccatgtagtagacgcctgtagttttcgcctgtccaggacgccttcacccctgcttcctttgagaaaagtccctctcccactccaagtggtactgacggggatcacccacacaaaagaaacctggaggctcccctcctggggcacccggcttctgctccaaccaggtgagcccaatgcctgcctgaagccacttgcgttgtttacaaacctgtttactccagttaagctgattatacaattatatcctttcattcttatgtaaactcatgaaatatggtaaaacaaaacagaactgtagctcctccatcaaaacaaaaatgtaagttaaatatttccaagttaataaaactaacagtatgtattgttgaatgtgagtgagacaactcaaagacattgtgaaggaggtgcggtcataaaaatctcgctctgtcacccaagctggagtgcagtggcacggtctttattttattttattttattttattttttgagacggagtttctctgttgttgcccaggctagagtgcaatggcgcaatctcggctcaccgcaacctccacctgcctggttcaagcaattctcttgcctcagcctcccaagtagctgggattacaggcatgcaccaccacgcctggctaattttttgtaattttagtagagacggggtttctccatgtcggtcaggctggtctcaaactcccgaccacaggtgatctgcccgccttggcctcccaaagtgctggaattacagggtcgagccaccatgcctggcctcagtggtgcagtcttggctcactgcaccctccgcctcctgggttcaagcgattctcctgcctcagactcccaagtagctgggattacaagtgtgtgccaccacacctggctaattttgtatttttagtagagatggagtttcaccaggttggtcaggctggtttcgaactcccaacatcaagtgatccatctgcctcggcctcccaaagtgtacctggccttttttttttaatggttatttcttggtgatatgttaaacaaggggtggattattcatgcctcccctttttagaccatgtagggtaacttcctgacgttgccacggcatttgtaaactgtcatggcgctggtgggcgtgtaccagtgagggcaaccagaggtcactctcatagccatcttggttttggaggattttggccgtcttctttactgcagcctgtttgatcagcaaggtctttatgagctgtatgacctagcaatgcatccaagtaggtctcagctttattttacccagcccctattcaagatggagttgctctggttcaaacgcctctgagacaaggtccagcaattcttccttggttgtgggattagactcagagcaagattcctgttcgttgcttcctgtgcccacagacagtgaactgtcgggaatctaccaggtcttttggagcaataggcttttcagggggtatcccaataggccaggacggcctgcatcttcacgtagcccctctgctcttgagctttctccttcctgccacctggggtggtggaaagggcattgggtttggagcagaaatgacttaggtgtgaacccagctctgccacttcctggccggctgtgcttggaaaagtaaccaagcatctccggagcgccccacttctcatctacaagacaggagtggtctttgcacttaattcagagggttgcatgaggagtagagagataatgctttcacggctccaggaacccagcgggctttcaagaaatgggatgttccttctgattccctcgctccagggccctcccctctggcccaggctctagtccccattaatcacaccgcgcgggctgcgacccctttaagtccggcttggatgacccagatccaaagtcatcgactctctagctgctatctctatggtaagttatcacttccggccggaagttgctgacggagctacttccgcccaggggagtgggaagtaagtggagacacgtgctttggcctgttggaggggaaacccgctctcgcctcctggtggtcgccgactcgcagtccgcaggatgactcagggcagccctgaccacagttccgccgccatcggccctagcctgcggaattgggctcgccccgggacgataacagagctctgccgggggctggaggcactgaccgggtgaccagagacccagagaccagaccccctccacggcgcccgggatttcggggacggcttctcccatcgcaagtagggcttggacgggaggcgacaaaagagaacttggtccgcacacagccaccgaaattggaatgaggagctgtagggaggccccgtagccagcagaaaagcattggggtccctggctgggttagcccaggtttctaggagtgtggtaagcgtcgaatgacttttgtccttttaaagcacattatgttactttttcccccaaggtttcaacagaaaatgagaaatatcccccgacgattggctgaaaacatgcagcaaccactattttcttcctgcccctcgttgatgagagcattcgaagtgacctcagcagggcatccaggtatgtcaagcatggtgacaaagtgttcaggtcagacggtctggggaaaggctcctgtgttgttgagcctgccaagttgtgggtgcagcatggtaccaggcagcccaaccctgacctaaagtaaattcccggaagaagtctttcctgggttttgaatttgcagtaacaggtgtgagcattctagcagcagtttgatgatcatgtatgatactgcaaacaggacctacgtttaaagaaaatggttgtagttagtatcagagagcccttgcttttcaaaacttcataaacaatgttactgtcatgtctttcattcaataaacatttgttgatacattggcctgacatcatgttaaatgttacggatacagagatgaagaaaacagtcatggcccttgttctctgggaactacaacccagttagggagacaaggttaaatgatcacacttaagagggcataattcagccaggtgcagtggctcatgcctgtaatcccagcactttgggaggccgaggcgggtggatcacctgatgtcaggagttcgagaccagtctggccaacatgatgaaaccccatttctactaaaaatacaaaaaattagctgggcatggtggcatgtgcctgtaatcccagctactcaggaggctgaggcaggagaatcgcttgaacccaggaggtggagaggttgcagggagccgagatcacacacaccactgcactccagcctgggcaacaagagcaaaactccgagaaaaaaaaaaaaaagtcataattcaggccgggcaccgtggttaatgcctgtaatcccaacactttgggaggccgaggcaggcagatcatctgaggtcaacagttcaagaccagcctggccaacatgaaattagctgggtgcagtggcatatgcctgtaatcccaagaggctgaggcaggagaatcgcttgaacccgggaggtggaggttccagtgagccgagatcgcgccactatactgcagcctgggtgacagagcaagactccatctcaaaaaaaaaaaaaagggcataattcaagccaaagtgagtgctctgaaggaagggaacgtaagaacatatatcccaaggatctggcgggtgtggtggctcacacctgtaatctgagcactttggggtgccaaggtgggaggatcacttgagctcaggagttcgcgaccagcctgggcaacatagtaagacctcatttctatgttttttaattattaaaaaaaaaaaaaaaaaagatccgatggagactagaaggcttttctgaggatgaaaccctcgagctagaatctgaaggatgggtaaaagtttgctgggcacagtgccccagcaggtgcagctggtgaaggaactgaaagaaggcctttgtagcccagaaagcaaagtggagaatggtgggaaatgaagctaaaaaggtgaagagctgggcgcggtggctcacacctgtaatcacagcacttttggaggctgaggctggaagattgcttgagccaaggagttcaagatcagcctgggtaacacgagaccttgtctctatgcaaaatcaaaaaagtaagctgggtgtggtgacccatgccagtgatcccagctacttgggaggctgaggtggggggcttaaagctgcagtgagtcatgatggtgccactgcagtccatcctgggtgacagagtgagaccctgtctcaaaaaaaaaaaaaaaagatagggaaggccaggccatacagggccttgcggctcaggcgaggatgttggtctttggcctaagaataatgggataccattatgggatttttggggtttttgttttgttttgttttgtttgagatggagcttgctctgtctcccaggttggagtgcagtggtgtgatcttggctcactgcaacctccacctcccagattcaagcgattctcctgcctcagcctcccaaatagctgagattacaggcgcacgccaccatgcccggctaatttttgtatttttagtagagacggggtttcatcacgttggccaggctggtctcagactcctgacctctggtgatctgctcacctcggcctcccaaagtgctgggattacaggcttgaaccaccttgccctgcccctttatgggttttatgtaagaggatgatacagacaaatctgtaattgcaaaagagcactatgtgcagaacatagatgatgtgctgtccagcagcactttctgcaatgatggaaatggcctatctgaccattttatgctatccagagcagccgcaagccacatgtagctgttgagcatttggtgactgtgagtccacattttttattttaactgtaaatagtcacatgtggctagtggctgctgtgttggtctacagtgcattagagggagcagtgccacctttccgggagtcgtggcacacagaacccttttgcatctcctgctcttcctcccgtcttggctgaaggttgagattatgcttctgggagaaccttcatgttgatttctcctggaggtctccaacagagacaataacagtttatgaaattttttttttttttttgagaaggagtcttattctgttgcccaggctgagtgcagtggtgcgatctcagctcactgcaacctccgcctcccgggttcaagcgattcttctgcctcagcctcccaaatagctgggattacaggcacatgccatcacacccggctaatttttgtgtttttagtagagacggggtttcgccattttggccacgctggtcttgaactgacttcaggtgatccgcctgccttagcctcccaaagtgctgggattacaggcctgagccactacacctggcctgtttatggaatgtaatattgattttctcggctgtagtttagcctgctccttcatgaagcagcgtcttccttctgtctttgcctgttttttgttagcacacagattgagaagtgacatcatcagtgcaattaagtacctacaggggtaagcacattgagtcatacgccgtggagggaatataaagaaaagtatggtccctggtgttaggggcttagaatctagcgatgtcagtaggcactatggaacaacaggaaaggacattttctgttgaacccttcaggggatgggaccctctcggggaagtaaaggctgtttccatctgctgaaatgtgacaaaaggcgggaagcatggaagaatgtggggagctccctagtgagagctgtactgagtaatatgtggctggagggaagggaagaaaagtaaagttggaatatgtaggttgataaccaggttgtagggcccttgaatgtcaaagttcaagtggcttttttaacaagcaggtttctaagggcaacgtggtggtctacagatgacagcctggagaaagatgggttagagccgggcgtggtggctcacacctgtaatcccagcactttgggaggctgaggcgggcggatcacctgaggtcgggagttcaagaccagcctgaccaacatggagaaaccccgtctttactaaaaatacaaaattagctgggcgtggtggcacatgcctgtaatctcagctactcaagaggctgaggcaggagaattgcttgaacccgggaggcggaggttgcggtgagccgagatcacgccattgcacactccagcctgggctaaaaagagtgaaactccgtctcaaaaaaaaaaaaaaaaaaaaaagaaagggaaagatgaggttaggaagtccttgtgatgtctttgagtaggaggtgaccagcccttggctcagtggtacctgtagacttggaagaatgaggggtggctgggggcccattccccgcagggcagaatcccagggtacctcccatgtcatgttctaggtggaaggtggattttagattttagagagtatctcatggagctcacagttttaaatattcagacttggtaaagtagaataagaactgatgcatatacttttctttgcaggtcagtttctggaagacttgtgtgtgtgatgaatgaatatctggttttgtctctgctgggcctgtgtgcctggaaaggaattgttttggcctaggatcatccaggtttgtttggtttagttcttgaccacatattttttgaatggtgactgcttaagaccctgttgtgtatggctataaatagatacacgccaaggtgaccacatactctgtggttcctgtgcccgccggccatgtgtctgagtgtgtagcctctcatcatctaaaggaactttggctgcagaggggaggcctggtcccatgggaagttttgggagcgcagcagcaggtgggttcaaacgacccagcaagtgcctccttagcacttagaggcggaggccaccacgttgtccacgtggggtttctgatcccagctccccaccagcctgctggacctcgggcaggtccctccctgtttgtacctccattacttcttcagtaagatggggacactgaagatgaccatgcctcccaccagattggtgctttttttgttttaataagggacagagtctcactatgttgcctataggctggtctcaagctcttggcctcagttttcctgcctcagccttcaaatatgctggggtgacaggcatgagccactgcactggcccagattggtacatttgagggttaaatgagcaaatcctataaagcactcaggagagggctgtggggtttgggctggggcctgggagcactttagacgtggtagctatgttgttgtcacctttctcctctttcaaagcattttttgtttgtttgtttttgtttttgagacagagtttcgctcttgtggcccaggctggagtgcggtggtgtgacctcggctcactgcatcctccgcctcccgggttcaagtgatgggattacaggtgcctgccacaacgcccagctaattgtttgtatttttagtagagacgaggtttcaccatgttggccaggctggtctcgaactcctgacctcaggtgatccacctgccttggcctcccaaagtgctgggattacaggtatgagctaccgcgcccggcacaaagcattttcagctgtgaaattccctggggtgctgcagtagaggaaggtttggggtcttgacgggtgctatttgccacggaaagatgccttcctgctcccagggcaggagagccgaggtaagacttactgtaggctgtcgttttttttgtttgttttttgtctttgcgatggagtctcactctgtcgccaggctggagtgcagtggcatgatcttggctcactgcagaacctccacctcccaggttcaagcgattctcctgcctcagcctcccaagtaactgggattacaggcacatgcccccacaaccagctaattttttatttttagtagagacagggtttcacatgttggccaggctggtcttgaactcctgacctcaggtgatccgcccgcctcggcctcccaaagtgctgggattacagacatgagccactgcgcccagccaggctgttgtttttttacctccttgtttgcacaatttgggccactcacaagagtgtataccctgtgataaacagttacctacattctcctctgcatgcttgtctttagaggaaggaaatgtattaattgcccaaagtaatatattgtgttaagatgtgatatatactggggaaaaaaaaagtgtatattgacatttctggaataaaccactttgattcccagttactgactcgttctcctgtgtggtgtctttcctgtatgcagaaggccggcttccccacaggggctgggggtgacttgtctgtccttggaatatgagtctttgcaagcagctgctgcccatgtgcacagttcctcgaggagttggttcaatcttggtttgggagtttgattggaaggattagatcctaggctcccctgagcagtaacatcttatttatagcgtggaaaatggacagagctgttgatacttaggagagctttcctcattatcaccccgaggagagtgcctgagtctccaagaggtcattgttggtctgcaagctcttaaggcagaagagtctgccagtaacagggaaatcaggacaggatgggaatgagtgtcccaaggcagtgacagaagctgaggctgaaccttcccaggaatcctccaccttcagggtgccaccttgtctctgcatgaagtgtctgcagacacactgcctgaaagtggctccttaacaatgaacctgcttgccttttctctgtcactagaccccaagacaatgaagagccttcattggctgggcatggtggcttgcgcctgtaatcccagcactttaggaggccgaggcgggtggtcaggagttcgaaagcagcctgaccaacatggtgaaaccccatctctactaaaaatacaaaattcaaccaggtgtcgtggcaggcacctgtaatcccagctgctcgggaggctgaggcatgagaatcagttgaacccaggagacagaggtttcggtgagccaaggtcacaccactgcactccagcctagaagacagagcaagactttgtctcaaaaaaaaaaaattaactaattactgaaataaataaacagccttcactaattctcctacacagtaatgggcgcgctcctcctacacaggactggcatgctgggcatctttctgggtgatgggagggaggcctagactccatgggtggaggcctaggaaggttttgtgtggctgtcaggaacattccctggccttggctgtctcctgctgtcattcagttccagctccttgcagtcagtcttttttttttttttttttttaaatagagatgaggtctcactgtcttgcccagactggtcttgaactcctgggctcaggtgatcctcccacctcagcctcccaaagtgttggaatcacaggcatgagccatcacgcctggctacagatggtgctttcaatattagcaatggataattaaatatgtggttaagaagttgtatttaaggttaaaaatcactatgaggctgggtgtggtggctcaaacctgtaatcccagcactttgggccaaggcaggcggatcacctgaggtcaagagttcgagaccagcctggccaacatgctgaaaccctgtctctactaaaaatacaaaaattagccaggcgttatgttgcgtacctataatcccagctactcgggaggctgaggcaggagaaccgcatgaacctgggaggcagcggttgcagtgagccgagatagcgccactacactccagcctgggtgacagtgagactccatctcaaaaaaaaaaagtcaccgtgggacacaagccctgtatcagaaaaggtatagaaattaaagaacagttaagtcaagattttgaatttctctcttcgtccactagaggatgtaatccaacaccagactgtgttctctgatgtaacttggtatagagtttgggttttggggcttttttgttctgttttgatttgtgtaatttagccaagactttctgtgaccaaaaagttatgtctgttgtaacttggtacagagtttggattttggggtttttttgttttgttttgatttgtgtaatttagccaagactttctgtcaccaaaaagttatgcagaagattcatctgcggggctgggctcttagttacgaatctgtccggttgtcccagtggaatcagtccaggtgtcttggttcgtgataagtgctttccttggaagcgtttatcatgtcaggaaccaagcacaggcactgcacgtggagataagagcgtgttctaatacatttctccgttccaatgtactcccagtgccagctggtgagaacatcgggaaagattttctttgtaaggaatccagtgttaacacgtaccagtatttgaagtcccagacagtgtgcattaagggtttagaagtgtctctggcatgaacattgcttataacttgaaattgacaggtacttatcaagaccaaacaaagtttgcacaaagccagcacagttaagagtgctgattgtggccgggcacggtggctcacgcctgtaatcccagcactttgggaggccgaggcgggcggatcacaaggtcaagagatcaagaccatcctggccaacatggtgaaaccccgtctctattaaaagtacaaaaattagccgggcgtagtggcgcacgcctgtaatcccaactactcgggaggctgaggcaggagaatctcttaaacctgggaggcagaggttgcagtgagccgggattgtgccactgcactccagcctggcgacagagcaagactccatctcaagaaaaaaaatttaaaaaaaagagtgctgattgttagctggtgggaaagtggacttgctgggtgggggcgggggagtggggagaatgaccattctgaaagtgtaatcttcaacagagtactgtacgttctctggcttattagcccggtgaacagctttctgatggttttagttgaacaagtattgctggatatgttaaaatacagccagaggcaaaacatactccctcctctcagagaacttatatcccaggataggggagactggaaacaggtcattagaatatgcagaataacagatgagtgctatggagagaaagacagcagccccactacggaggagcacgggatggggtttgcaattttagatgggtggcctttaaccaaatccttcagtgagagtaagtcacatgatgaccaggaagagcaccccagcaggggaggcagccagtgccctggcacacaagcaaaaggagttgatgagagggctggggggctgaggccagatctcatggggcctcacatggaggaaagtgtgggacttctgccttttctctgaatagtgtccgtagcttacatattctatctactcttgccttttaggaaccatttttccctctaatggtagtttacgttagaagtatttcctgttctaggcccggtgcagtggctcatgtctgtaatcccagcactttgggaggccaaggcaggtggatcacctgaggtcaggagttcgaaaccagcctggccaacatggcaaaaccccatctctactaaaaatacaaaaattagtcaggcgtggtggtgcatacctgtaatcccagctactcgggaggctgaggtacgagaaatgccagaacccaggaggcagaggttgcagtaagccatcgtcgtgccactggacttcagcctgggcgacagtgagactgtctcaaaaaaaaaaaaaagtatttcctgttcctacacattggcccattgagaggatcccaggtctatgcatggggacaccgtctttttggctcatgttgagccacatgtcctgcagtatttggaagtgttctgggacagactttgttcacataaagatcgcgtgcccttcactgcagtgatgaagctggagactgtctttctctgtgacaaggacctcagccctggatctgtcctctcctagtgcccacctcattcatggagctcaccccgtggttttggaattgtttccttccctgtgccttagcttccctgaacactacttctacactagctccttgagagtgggagccctggacttattgctttttcaacagagtagatatgtgtgtttcatttatatcagtatttaaattgctagcaacaagaccacaaaaactacattctcatagaagcctgtttgggtttgatgtggttacatgtgattaatgtatttgaaatagttatttgttgtgattttttttttcagatcaattatgcagctacagccaaaaccaagttctttttattgcaatggtaatgaaaggagccccgtgtaagtcactggaaggtcacatgttcacagactgtcagctgtggagggttatgtaacagtggttatgcaatgccacgttagaactacagcccgagcagcaaaacatttagataattttattgaattaaaataagacttccactctctttgaatgacaaatcccttttaacaaaaccaagacttgggttttaatgttgactcccacacgaggctccgtaagccacattttaccttctatgcgtggctggccccattgagtagatttctgaaagtcaaatttctgacatgagcctatttgaaaactttgctcagttgtcatcttctatcaggatgagttatggacgaagccccccataaatcctaaggcacatcttgaagcccctaaaatccaaaggcatggccgggctcacatctgtaatcccagcactttgggaggccaaggcgggtggatcactttgaggtcaggagttcgaggcaagcctggccaacatggtgaaacctcgtctctactaaaaatacaaatattacccgggtgtggtggcacactcctgtaatgccagctacttggaggctgaggcaggagaatcacttgaacgtgggaggtggaggttgcagtgagctgagatcaccccactgcattccagcctggatgacagagtgagactctctcaaacaaaaacaaaaaaaatcctaaggtacgtgagtctccttcactaatgtactgtctttgttccaagatacttcaccccttcgaaagttaacggggaagatcaaaaggaggtattaagagatcaaaatgaaataaaggcttcatgcgttttttgttgtttttttttaacatgccccagcattacaacaaaaacatgtctttttgtttaaaaaaattttttttcccaaagtaatacatgcattagttcaaaaaattcatagaactaaaaggcttctaacactaggctaagcttccctgctctggcgctcccagcgggagccattttccattccttcagcttcgctggttttgtttccgaggagcgggcgtgctgcgctgcttctctttgagtcatctgggtcctcgcctgttgactttcttcctggtagatgtggactgacctcttcctggtagatgtggactgacttctgcctattcaccctctgcttccccttctgcaccctccgagcactgtggtcatctgtacatgcggcattcacgttagtgcgcatgcgcaaaaggtgcctaccgccctgcgctgcagtgtgtgcattctgtattgttgtccctgttaatttccccttccttggctggctttttctttttttttttttcttttctttctctctctctctcttttttttttttttttttttttttttgagacagagtctcactctgttgcccaggctggattgcagtgctgtgatctcggctcactgaaacctctgcctcctgggttcaagcaaatctcctgcctcagcctccagagtagctgggactacaggcgcccaccaccacgcccggctaatttttgtatttttagtagagacagggtttcaccatgttggtcaggctggcctcaaactcctgacctcaagcgatccacccacctcggcctcccaaagtgctgggattacaggagtgagccaccgcgcccagcctgggctttctctgaacctgctgctaaattcttcccacacttcctggtggcctctcagcgtaactttacgtaaggtcaatcaagttaatttatccattccaatttttttcttagatgagtgagagaagacttttcatacaattgattaaagttttgttacaatattgtatgcaggggtcaggctgtagtagtccaattcataagttcacatttaggtagggatattttataggaaaatataagagctggattattgttgttaggccaaatctagagtcacaggctgatggttctgacaggcagctggttgggtaactggtttcccagaaaactccttcccaatcttgccagtctctacccagaagcaagttatgaatttattaattatatcaggtagaaagggctctgtcccaagcctggtttagtgttaagcatatagtccctctcttttttttttttgagacagagtctcgccctgttgctctgttgcccaggctggagtgcaatggcacaatctcggctcactgcaaccccagtctcccaggttcaagcaattatcctgtgcctcctgagaagctgggattacaggcgcacaccacgccaggctaatttttgtatttttagtagagatggcgtttcaccatgttggccaggctggtcccgaactcctgacctcaggtgacccgcccacctcagcctcccaaagtgctgggattacaggcatgagccactgttcccggcccctcttttttgaccagacataataactgtcatggttaaatccctgtcttggttcagaaggcccacgttgttgcatttttggtctaagaatataagtgaatttgttgtctagttgagtgcttcccaaacaatttgcaaaggactcccctggggatcccatcaaaatgcagcttctggtggttctgtgggtctggcctgggctggagattcggcagttctcacaagctcccaggccatgctgatactgctggtctgaggaccactcggtcctttctcagggatggtgggacttaggcgtggacttactttgtagaacacatcatcctgactattggtggtgctcatttacacgttgatgtaattcctttaaaccagcgtcctgtgttagggaaaacgttcccaacagtcccgttgcggtcaccatttcttgtagtttattcaccagggtctctatgtcatgcaagctgggttctctgaggtctcttatttacataggtacatcaagaggcaatgattaacatccaaagacctctttgctatttgcttaacaaaactgcagtcatctgttggggaaatataatttaaaaacaaaatcccccaacccagaaagcctcgccacaaaagtaaaagcaaaagaaaacaattttatgattgaataagcattaaaccaaaacgcgttgagcatcacaggcagcccactgaaagaactgcagagacaaatctcccgctttgatacagctaagtggatacagcccatgcactgtgtaagtgggttttgccatttagaatcaggtgacagctgaagttgggatcatcccctccggaaaacagttatcttccttgatgattacagttcacgtgggtggctcaggtccttggggaaacatgacttgagttgggggaaactggcaggagactcatttaaccacttgaaagctgtatacacttttgaaaaggacagagaaagaaattctgaaaggatatggaagtgaagggtatcttcccttgttttctttctcttcttttttctttttttcttttttttgagagggagtctcactctattgcccagcctggagtgcagtggcgtgatctcggctcactgcaacctccccctcccaggttcaagtgattctcctacctcagcctcatgagtagctgggattacaggcacatgccaccacaccgagctaatttttgtatttttagtagacacagggtttcaccatgttggccaggctggtctcaagctcctgacttcaggtgatcctcccaccttggcttcccaaagtgctgggattacaagcataagccaccatgtctggccttttttgtttattttaaagacagagtcttactttgtggctcaggctggagtacagtggtgtgatcatggcttgctgtgacctcgaactcctgggctcgagggatcccccctactcagcctcccaagtagctgggactatacaggtgcatgccaccatgcctggctaattgttttactattttttagtagaagcgaggtctcactatattgcccagactggactcgaactcctggcttcaagtgatcctccacctcggcctcctaaagtactgaaatacaggcatgagcactgcttggcctgaaatgatttttctttcttttttttttgagagggagtcttcctctgtagtccggtctggagtgcagtggcacgatctcagctcactgtaacctctgcctcccaggttcaagcaattctcccacctcagcctcctgagtagctgggattacaggcacatgtgaccatgcctggctaatttttgtatttttagtagaaatggggtttcaccatgttggccaagctggtctagaactcctgacctcaggtgatccacctgcctcggcctcccaaagtcccgggattacaggcatgagctaccatgcccagccagatttttcttttttgttgttgttttttttttgttgttgttttgttttgtttttgagacagaacctcaccccaggctggagggcagtggtgtcatctcagctcactgcaacctctgcctcctgggctcaagcgattctcctgcctcagcctcccaagtagctgggattacaggcatgcgcccccatgcccagctgattttgtgtattttagtagagacgatattttgccatgttggccaggccagtcttgaactcctgatctcaagtgatcctcttgtctcggcctcccaaagtgcttctccatggcagtagttactgtccccagcccttgcagtcatcctttccaatagtctctcctcctacgcctggatttgtttttcatttgacactgagctgccagaaggcccggctccatggggttatgaggatacaatgcacagcgggaagaccgtggatccaggcggcaccgggcggggtcccagtgccacctgcttatgacctgctccagagcctgtgcactcgctgaccctgccacctggcacgccctgcccctgtccttcccactccctcttgtgagtcagctcacagctcaataccaccagggaggccctccctctcttcccaccgtaaagtaggaaccccatcttcactttgtcccaagatcatcaaagcagagaccgtatccaaaggactcttttttgtatttacttttttttttttttttttgagacagagtctcctctgtcacccaggctagagtgcagtggtgcgatctcggctcactgcaacctccgccttctgggttcaagcaattctcctgcctcagtcagcctcctgagtagctgggattacaggtgcctgccaccacgcccagctaatttttgtatttttagtagagacgggatttcaccatttggccagaatggtctcaatctcctgacctcatgatccacccgcctcagcctcccaaagtgctgggattacaggcgtgagccactgcgcccggccttgtgtttacttttttttttttttgtctccctttgtgaacccagaaaatctgagacagttctctgttaatttagaaagtttatgtttttggcctggtgtggtggctcacgcctataatcctagcactttgggaggccgaggagggtggatcacgaggtcaggagatcaagaccatcctggccaagatggtgaaacccccatctctactaaaaatacaaaaattagctgggcctggtggcaggcacctggaatcccagctactcaggaggctaaggcaggagaatcgcttgaacccagggggtggaggttgcagtgagccgagattgcgccactgcactctagcctgggcaacagagtgagactccatttcaaaaaaaaaaaaaaaaagaaagtttttttttgtgtgtgtgtgtgtcaaggttgaggacacgtacctgtgacacagcctcaagaggtcctgaggacacatacccaaggtggtcagggcacagcttggttttatacatcttagggagacaggagacatcaatcaatatatgttaagaagtacattggttcggtctctggaaagccaggataacttgaagcaaaggaaggaagactcaggaagggagcttccaggtcacagattggtgagacgcggtttcattcttttgagtttctgatgagcctttccaaagaaggcgatcggatatgcatccgtctcagtgagcaggggggcgactttgaatagaaggggaggcaggttggccctaagcagtttccagctggatttttccttagtgattttgggggcccaagatattttcctttcacgccttcaactggaaagtccactccagggccatggtgactgtcttgtttacccctatacccagacagggctcaagtgtgtggtcagtgttcgtgaacaagaaagtgactctagcctgtgacatgctcctcgctgaccacccccccccccaccccacgtaaaaagagttcaaggaggtcccatttgcaaagtactgggtacctagtaagtctgtaatattataaattgtgcttaccaccctctttccatgatatagtcccattcccccatgttttagagaacattcagattaacctccgaaagattaaatgatggtaaggatatagtgcagagatgtgaactcctgtgtcagggaggaaaaactttaccctcatgttcatggttggaggcctgcaaattaaactgaccaaagaaagattcacaggagaaaagacttttaaacattcatgtacaccagagttcacagaaaaatgtgactcaaggttaagtggttaggatctggggcttgtataccatcttcatgaagcaggggactcttaggaaggatgaatgggcccagaggagcacaggtgggatttatgttagtcttgtgacaacagctgtttaggtgattgcttatcctggtgagggactggtgagaggagacaatcttccctagtgcaaaactccctaaaaagccccagggaggggatttgtgacagttgaattattttgagagattctgtttttaagcagataagtagagttcagaggaaaaaaaaaaaaaggaaaagtcagtctggatatcagttcgtctacctaattttgccacgaatcaaggaaatcaccctgtactttccttctccgtggccaggggacattgaaattatttggttctggcagggcatggtggctctcgcctgtaatcccagcacttggggaagccgaggttggcggatggcttgagcccaggagttggagaccagcctgagcagcatagtgagactgtcttctacaaataatttcaaaattataggaggccaggtgtggtggctcacacctgtaatcccagcactttgggaggctaaggtgggcggatcacaaggtcaggagtttgagaccagcctggccaatatggtgaaaccccgtctctactaaaaatacaaaaattagctggacgtggtggcacgcacctgaagtcccagctactcgggagactgaggcaggagaatcgcttgaacccgggaggcggaggttgcagtgagccgagatcgtgtcactgcactccagcctgggcaacagagtgagactttatctcaaaaagataaaacaacaaaaaaattatgggaggctgaggcgggtggatcacctgaggtcaggagttcgagaccagcctggctaacatagtgaaagcccatctctacctgggcaacacagcgagactccatctcaaaaaataaataaataaataaattagctgggtgtggtggcccgcacctgtggtcccagctactcaggaggctgaagtgagaaaaatcacttaagcccaggaagttgaggctgcagtgagccctggtggcgccactgcactccaacctaggcaacagagtgagaccctttctcaaaaaaaataaaaaagaaaaattatttggttctcaggagagaaataggctgcgttctccttctccagccccgggcttttctttgctgttcaccttgctgactccccatgaatgcttgtatccggccaccagggtggcattttgcagaaaagcagtaatttgcatatcacctaaaagagttcacacatcccccatggggtgtaatataccatcaaggatcacttaagtactggagagaagcagctgatcaatgaagagctttaatgacttgagagtctggggcaggggagaatctaatttattcagccaaccaccgtggacccacaggggaaagaacaaagagccacaaacaaaaactcacttccacttcaggaccacttagcccacgccaggctccgggctccggggtccaggctccaggcaccaggctctgggtatttaatcctcagaacagtttctgagactggcatccttatctccactttaaagacagggatggaggctcagggacgatcacttgccaaggtcacacagctattgagcgctgggtaggaacgaaaagaaagagtctccttcgtgtagtttcaaactaatgaaaaatggaaaaaaattcaaaagtattttcagtaaacaaaaaatctattatatatttctattctatgttatgctagttaatgaagacatagatgaaaaggagagagggggagagagattgagaaagtccaagaaaacaggaaagagaaatgagatacaggagtccgtagaccaggtcagaagatccccacccacaacggtggatggcagaataaaccgcaacctcctcacacaccgaggggcttgggggattcccggtgacgtaaaggtgccctccttgactttcttgcaacaacagcaaaggcttctccacagtggcgttctaaaggtttcccacgcgctgacggctgagttggttttcaagctttacttggagcttgctgacactatcacagatgcctgaaagtccctttgagaaaggagccatgctggctggttttagcccacagtctctgaacacaatttggtattgactttttatttatttatttaaaaacagagacggggtctcactatgttgcccaggctggtctcaaactcctgggctccagcgatcctctcacctccgcctcccaaagtgttaaaattacaggtgtgagccactgctcccagccagtataaatgtttgtgtcagttttcagccccctgttccatgcccccccataccatgcgcacgcacacacacacggacttagattctccccatttgagcagctttcctccagctgtttgggcgagtgtgcagtgctgccatataaatgtgctcaataaagcccatggtgatgactcatctcggcactatctgagctccactttccccatccagagtcccgagtttctgcattaaacgtggtcgtcataacccagttctgtccggcaggaagcccttgctacagacctgggtccagtgtgtctcctctggacagttgggaggtggcagccctatggttcgtgtgggttcttcccacaggtaactgaaacagagggccagagggatgggaccccagcatagaatatgaatgtataggccaggtgtggtggctcacgcctgtaatcccagcactttgggagcagaggcgggcagatggcttgaggtcaggagtttgagaccagcttgggcaacatggcgaaaccctgtctctactaaaaatacaaaaatattagccagtcatggtggtgcatgcctgtagtctgggctactcaggaggctgaggcaggaggatcgcttgaacctgggaggcggaagttgcagtgagccaagatcatgccactgcattccagtgtggccgacagagccaggctctgtctcaaaaaaaaagaaacagctgacatgtatatatacattcatctctgtctccaaaaaaaaaaaaaaaaaagaatgtatatgtcatctgtttctttttttttttttgagacagagtttggttctgtcacccaggctgaactgcagtggcttgatctcagctcactgcaacctctgcctcccggtttcaagcgagtcttctggctcagcctcccaagtagctgggattacaggtgccagccaccacaccagctaatttttgtatttttagtagagatggggtttcaccatgttggtcaggctggactcaaacttctgacctcaggtgatcatcctgccttggcctcccaaagtgctgggattacaggcgtgagccaccgcacccagcctggggtttggctttatagactaagggctgaagaaagcagaaacagaacaaaaagcatattggtcatttcaaagttaaattctttgtaaggcaggaagagatacaggacaatacaaagacaacaagaaaaagataaccagtcacagttacatctcttttttcttatagagatgatatcttgctatgttgcccaggctggtctcaaactcccagcctcacgtgatcctcctgcctgggcctcccaaagtgctgggatcataggcgtgggtcacagagcccaccaagttactgtttgttgtaagggttaaaacagagggaacttcattagcatgctgacttgagactgaaactggcctccttgggaaattaggctgctatttctctcgcctgatttcttgggaagtcagataacaactcagtgttggtttgctgagcacgggtgactccattttgatttttgtctggtcttttggggcctagtgcaggagtttagtccaaaacaagggcctcctatgatttttgtttaacactctgaaagagaacgaactgaaactaactgttcaaaggtatattttctctttgctttctgtagcttttattgtttaatgctcagccttggaaggatatgccgttccatatgttctaaaaggaacaaaacagtctaccagtacttagcatctactcatttccagccactagagtccccagcctcaccacagtttagcagactgttagctgttacattaactaaatgcgtaaaatgctgatatcctaatatgcctctttttttgaaaatagcatcataattcatcataatttgtaggctcgcaaacattttcttggaatccactggactcccccatgctttttaattccgtactttctgtgcaagcaacacaatagttggaactgacttcaggccaactgcttccttttaacttttgtcatgttacccagaatagaggcatggagttgtttacccggttttcattgaggaacattctttgtcttccaaggaatacataagaagccttcctgtctcagaacaccaagctctgaaaggtgacttttctgctcgagtaattacactggttgactgagctccggaaaggaaacgcattcttggttgcagagagaggaagtggcttgcattgttggacaaaaagaaaaatgattgtttcctagggtcactgtcctcagcctccctttagagagcctggatcttgcagccatcagttatggaagtggctctgggaataactttgccctgggtgatgattgttgatgaaaagagtcgaagtgtataaaatatttgaagagatttattctgagccaaatatgagtgaccatggccagagacacagccctcaggaggtcctgagaacatttgcccatggtggtcaggacgcagcttggtttaaacattttagagaggtatgagacatcaatcaaatacatttaagaaatacattggggctggctgggcgcggtggctcatgcctataatcccagcactttgggaggctgaggtgggtggatcatgaggtcaggagattgagaccatcctggctaacagggtgaaaccccatctctactaaaaaaaaatacaaaaaattaactgggcgtgttggcaggcacctgtagtcccagctactcgggaggctgaggcaggagaatggtgtgaacccgggagtttgcagtgagccaagattgtgccactgcactccagcttgggcgacagagtgagactctgtctcaaaaaaaaaaaaaaaaaaaaaagaaatacattggggctgggcacagtggctcactcctgtaatcccagcactttgggaggccgaggcaggaggatcacttgaggtcaagaatttgagaccagccttgccaacatggtgaaacctcatctctgcaaaaatacaaaaattagccgggtatggtggcaggcacccgtaatcccagctactcgggaagctgaggcagaaggatcgcttgaacccaggaggcagaggttggagtgagccgaggttgtgccattgcactgggtgacagagcgagactctgtctcaaaaagaaaaaaaaaaaaaaaaaatacatgtgtgtggtccagaaaggcgggacaactcaaagccgggggtgggattccgggctatacgtgaatttaaagattttttggttgacaattttttggctgagtttgtctaaagacgtgggattgatagaaagggaatgttgaggttaagataaaagattgtggagaccaaagttcttttgaagtgttttttttttttttgagacagagtctcgctttgtcgcccaggttggagtgcagtggggcaaaagccacagacactcaaggccagccagtgcaagcagccggcagccgggaggggggctgaaccccaaaaagccacagggatggagctgcccaaggccatgggagcccacctcttgcatcagtgtgacctggatgtgagacatggagtcaaaggggatcatttggaactttaaggtttaatgactgccctattagattttggacttgcatggggcctgtagcccctttgttttacccaatttcttccgtgtagagtgggtatatttacccaatgcctgaacccccattgtatgtaggaagtaattaagttgctttcaattttacaggctcataggaggaagggacttgccttgtctcagatgagactttggacttggacttttgggttaatgctggaataagctaagactttgggagacagttagaaaggcatgattgtgttttgaaatgtgaggacatgagatttgggaggggccaggggcagaatgatacagtttgtccgtgtcccccacccaaatctcatcttgaattatagtttccataattcccaagtgtcctgggaggaacccggtgggaggtaactgaatcatgggagcagttactgccaggctgttctcgtgttagtgagtgagttctcaggagatctgatggttttataagggccctttccccgctttgctcagcacttctccttcctactgccctgtgaagaaagtgcctttcttcccctttgccttccaccatgattgtaagtttcctgagactttcctagccatgcaggactgtgagtccattaaacctctttacttataaattagccagtctcgggtctctcttcatagcagtgtgagaacagactaatgcaggggggctattatgttgccaatcacaggtatataataaaaagttaagaattataatttctaagtggtaggatttcccttaatccttttctcttatctatattttcagaagttttcccaggaatacacatactgcttttgaaatgagaagaatgaaatctcatttatagtctatattgacgtctttgcaatgttcattaatccacctctcaggacagccctgagaagtgcatactgttcctgaacagttaacagttacaaagatgaattgaaaagtatttaggcggccaggcgtggtggctcacacctgtaatcccagcactttgggaggccgaggtgggtggatcacgaggtcaggagatcgagaccatcctggctaacacggtgaaaccccatctctactaaaaatacaaaaaaatatggtgggcacctgtagtcccagctacttgggaggctgaggcaggagaatggtgtgaacctgggaggtggagcttgcagtgagccaagatcgcgccactgcattccagcctgggcgacagagcgagactcaaaaaaaaaaaagagtacttaggcataatgggtcatgcctgtacttctagcactttgggaggccgaggtggaaggatcacttaagaccaggagttcgagaccagcctaggcagcaaagcaagactctttctctacaaaaaaattaatcaggcatagtgacatgtgcctgtagtcctagctacttcggaggctgaggtaggaggatcacttgagcccaagaggttgaggctgcactgagccaagatcgtaccacttcactccagcccagacattagagcaagaccttgtctcgaaaaacaaaaaaaagaaagaaaagaaaaataatgctttttactaggatttttacaatatgtgaaacgaattctatcttgagaacagagtattggtattgccagtaatattttaaagttcttttgcttccaaaaaggaaggtcaccttccctgtctataagaagtcagtgccaccttggcccacagaacctcagattctcacctctgccttcccagccagccttcccttcttgggcacttttctgggacacaggctgaatgcacccaaaaatgcatcagcaggcttgataaagaacgagttaaggctgggctcagtggctcacacctgtaatctcagcactttgggaggccgaggcaggtggatcacctgagttcagcagttctagaccagcctggccaacatggtgaaaccctgtctctactaaaaatataaaaaaattagccaggtgtggtagcacatgcctgtagacccagctattcaaaaggctgaggcacgagaattgcttgaacccaggaagcagaggttgctatgagccgaaattgcgccactgcactccagcctgggtgacagagtgagactctgtctcaaaaagaaaagaaaagaaaaagttgaaacaccaaccaaggtaagttcatctcccttctaagccacccatgagacactgctggggtgaagaagtcactgtctgtggcaaaaaccatttagatgagaagtggacacccttaaagcttccgcttccctctgcagtacagcaaagagttaagcatgataggttagtttctattattcccaccttgtgcagagattcaatgtcccctaccctactcacaggcctaaaatgctccccaggcacagccttctggtcccaggagagagatcccggctgctaaatgcgggtgcaaataaaatcagcaaagggcgccctggatgtgaaggaggtgtgggtgtcagcctgcaatccccacctgcagcaagatcatttttataaaaccctttgtttggccacctggatatctgtgacaaatgatcccaggagccactgccttccctccaccccaccacatgattcaaaaggcaggcactggctgggcaaggtggctcacgcctgtaatcccagcactttgggaggccaaggtgggcagatcatgaggtcaggagttcgagaccagcctgaccaacatggtgaaaatcctgtctctaccaaaaatacaaaaattagctgggcatggtggcgatcacctgaaatcccagccactcaggaggctgaggcaggagaatcgcttgaacctgggaggcggaggttgcagtgagccgagatcgcgccactgcactccagcctaggtgacagagctagactccatcccaaaacaaacaaacaaaaaaggcaggcactggccaggcacagtagctcactcctgtaatcccagcactttgggaggccaaggcgggcagatcacctaaggtcgggagttcgagaccagcctggccaacatggtgaaaccccgtctctactaaaaatacaaaaattagctgggcatggtggcgcatgcctgtagtcccagctacttgggaggctgaggcaggagaattgcttgaacccaggaggtggaggttgcagtgagccgagattgcgccattgcactccagcctgggcgacaagagcaaaacttcatctccaaaaaaaaaaaaaaaaaaaaaaggaggcaggcacacacttgaaacaagccattaagtcccagtagcattttctggaggctcccagctatagcaggaacacaggtctcttctcagttcctgagaagagaactgttttcttgttttgcctttagtcatttacttgaaccactccagaaaactgcccgtcctgctgctgcctgcctctgaccatgtaccagtcacaaataaactgggaaatgcaaacgtgggtgttttatataacttgcagcccctgcatctgcagctgtgtattttgtttaaagctgcaagcccggccgggcacggtggctcatgcctgtaatcccagcactttgggaggccgaggtgggtggatcatgaggtcaggagttcaagaccagcctaaccaacatggtgaaaccccatctctactaaaaatacaaaaattagctgggcgtggtggtgtgcgcctgtaatctcagctacttgggaggctgaggtggaagcattgcttgaacccgggaggcagaggttgtagtgagctgagatcgtgccattgcactccagcctgggcaataagagcgaaactccatctcaaaaaaataaataaataaaaaagctgcaagcccttctgcttttcctttggtggcaaagtttggtcaagggtgttttcaacaataattccacttgtttcaggccccttttggggctcagacccttgctcctgactgtggctgtgaaggggtggaggtctagggccttcattctgggtggctgctgttcttccctgatgctgccccctccaagagaagggatattttaggcgctgattacattgtgagttgttgcaaccaaaggagcatgttctcttgctttcaaaacacaggaaacaaatcactgttttctaagtgaaaaggaacaaaatcagcactgagagaggtcgtgggagctgttttccaagtatctcagaatacttggcaggatgaagcaagaagacctatatttaaaatcttctttatcaaggcctgtttgaagtcagtttattgtttggtaaagaaaagaagacaaaagttttgactctcctttttttttttttttaaattttgagacagagtctcactctcacccaggctggagtgcattggcaccattactgctcatcgcagcctccaactcctgggctcaggcgatcctcctgcctcagcctcctaaatagttgggactacaggtgcacaccaccaggttcagcgaatttttatttttatttgtagagatggggtctcactatgttgcccaggttggtctcaaactcctgagctcaagcattcctcctgcctcagtcccccaaagtgttgggattatagggatgagccaccacacccggctgacatacatatttttaaatgctgtaaaaattcacattgatttaaacgttttaggggtctttgctgttgcaagaaatttgtgtgcctgaggaatccctaaataaggcagcctgttgtgagaactataataatgatgtgagtaaaacccggagccagaacccagaagaaggagaaattaattctgacccttaaatctcggtgtcacacagaggaaatgaaccgggaaggatggtgtgggattgtggagggcagaggttgggagaaaagaccttccagttggaagaggctcaaagtaaagttctggagtgggaacttgggaggaggcacctgctcctgtctgaacagagagccatgtgacggacctggttttcagcccctggctcttggggcagagtaaaactgaaaggctcatatttttcatcattgtttgcatattgtgttttacaagtctgagaagtagtacagacataaatttgctacaaagccaatttggaatttgaagggacatttttatcagtaacaggatgtttgaacaaacttggaatttcatggacttttccacaaccctctttcatgtctgtaaggagcttacctggcaggatgctctggggtaagtgggactgtagaagtcccctgtctcatccaccactgcagctgtgagagggggctggggccatgggtgggaggatttttggaccatgattccaggcggacaccccatctttacaaaattaaatggtaagcatcctcttcatttgctgtaattggctgtctctggtgttagttgagttccatttacccaacagttttccgtctttatctattccctgcagtaaatgcaatggaaggccgggcgcagtggctcatgcctgtaatcccagcattttgggaggccgaggcgggtggatcacgtgaggtcaggagttcgagaccagcctggccaacatggtaaaaccctgtctctactaaaaatacaaaattagccgggcatggtgacacatgcctatagtcccagctacttgggaggctgaggagggagaattgcttgaacccgagaggtggaggttgcagtgagccaagatcgagccactgcactccagcctgggtgtcagagcgagactctgtctcagaaaagcagaacaaaacaaaacaaaaaaaatgcagctgaagtaagctctacacagaggcaccgttggggtgcacgtagaaacccaatcgacatctttccaagagattggtattttaaaaagaaataataagctattctcacaggccaaatgaatgtttgacagcctaatcaattgccctgaagcttttagacagggctgatgaattagcataacttcacagatcaactcttagatgagaattttccccatggagttggcctgtcaccaatgaattgctcaagaaaacccagccctactgaccctggccagctcctgcaggaagaaatatttggtaggcttgagggataagaaagtctttcattccaatgaagttgggcaaaggggcttcgtttggggaccttttggtctttgagactccctgaatattatctcctgtgcctccttcttcgttcccaccactttaagggagactatgcagaatgacagaatgatttggccttttgcagtgggcctccatgggacccagcatgataagaaggccctaaaaacaagactgccctggtggatccctcacctccccctacacaaggctggcactgaagttctctcgaacctaggactgggagcccaaggcttggacgccaaacagcaaagcttcatctaatctcagtcagcttcagggtcaactggacagcgggaatcatttgattttttccatctgggcatactgactaggccatcaggcccacctggctcatgctgttcatgccagtgtcccagtagctgggagcatgtgctcagagccattaagggtgagtgcggcaggccgcactgtggaaggggctggaacagcttttccctatcgtttatcctgaagccttcttacctaggcggtctttcaagggtgcccatggccacctgggcgttgtctccgtcctccttgaggattacaaatcagtgatctctgagtttatctcccagtcaggtcccttcggagagtgaaggaggccttgttaattaccaccttcgttcagtaggcacatatggagactgtcctgggccaaatggaatgtatgtcaccctaattataaaggatggaaaagggaacaaaggtgactcattaatgagaccttgtagtctccaccgagtggaggactgtccccgagcctcatacgttccaagggcaatggacatgcttctgttatgtaatattccagatgctgccacgtccaatgtacggagcactccagttgctggtctgggaatgcgcttaacgtaaggaaagcctcggccccaaccagagaagatcatgctttttctaagtcaaggttataattatgcatttcgacagcctccttcctgtaattgttcagatgttcgtagcaggcgtgcatgcaggcggtgcacctagaagctgctgtcaatcaccatcgcctctttacagcattcctctctgattatgcagggagcacaggctttgactggcaaagtgatcccaagaggcttagcatgggaaagaaatagctagtactttccagaaaccatcccaccaccttcagcgggatgaaggaagccctggctttgctgacttcccaagaagcatcccaaaagcttgcttaacatctcagaaaacaaacctctgcatgcattgatgaaggaagaaaaatacagcctgtacaggccgggtacagtggctcatgtctgtaatcccagcactttgggaggccgagacgggtggattgcctgagctcaggagtttgagaccagcttgggtaacatagtgaaaccctgtctctactaaaaatacaaaaattagccgagtgtgggcatgcgcctctaatctcagctacttgggaggctgagacacgagaactgcttgaatctggggggcagaggttgcagtgagccgagattgcgccactgcactccagcctgggtgacagagtgagactccatcccaaaaaaaaaaaaaaaaaatacagcctggacaatcactgggtcacctgtccttagggattacgggcgaattccagactctgtcctacccaggaaggaatacctttcaggggttggaaggatgtttcaaatcacacctggtcctcattggcgttaaattaaacaaagttagatggaggagcaccatcaaggagccggtatccctgtgaaagagcagacgtggctgttgtcaaggaggtaataagctctctggcaggatgagaagcagtatttattttatccacctacaggatcaaagagtatgtatttgatgaaataatttatgctgagtgaatgtgaaatatcatctctaattgcaggcaattaatattttcactgataaggagagggccccaggctggcttgcctcaaacggcccttacactccagcagttcatacttctattatgtacataatccctggattacataaacccacctgcacttaaacctaccagctccacccacccttgccaaagctgtcactatgagaagaattagaaccttcgcaaatacattctgaaccaatgccacagaaaaggcagcagcttggaatgtcaggaacaacttcgggaatctgacctttgggacattccccaggctgccctgaccctcagtctggatttgccctaagaatactttcccgtattgcactgaaaacattttcagctcatttgttatactgcctgagagcccatcgactggagattagactgacaaacatcgtcttaaaaatgtgaatcatggccaggtgtggtggtgcacgcctgtaaatcccagcactttgggaggctgaggtgagcagatcccttgagctcgggagttcaagaccagcctgagcaacatagtgagacatcctatctttagaaataaaaaataaatttaaaaaaagtgaatcatgaagtgcccattagacatgtacatctaggcatgaagcgttctaaccgccttgttttgccactcacgtaggagctcagctagggatttcctggagcatgtcacaaccacagtgccatcacagagggacgaggacagaggtctagaacgtcgctgtgtgtctgcgtgttctactccccaactagggaatgcatccacaacctgaggctgccccggagtttctgatccttctctccacattcttttttttttttttaatgaagtcttgctctgtcgcccaggctggagtgcggtggcacgatctcggctcactgtaacctctgcctcccaggttcaagcgattctcctgcttcagcctcccaagtagctgggattacaggtgcgtgccaccacgcccagctaatttttgtattttgagtagaggtggggtttcaccctgttgtccaggctggtctcaagctcctgacctcaggtgatccaccggtctcggcctcccaaagtgttaggattacaggcgtgagccactgcgaccggccccttctctccatattctgattgtaagcatcacctttccaacacagaaatgtcagccctgctggggctccgatgtgtgactgagattcagctaattgcatgtccccacaggagacttggactcggaactcacttaggtgagagagaggcagggaacagagcatcgttttgttatcgtgggttgtggcagagggagcttggctctggaggcaggaaccaaggcagcaacatcctgacttggcagctgcctaatccgggtgaggtggcagctccatcggtgagatggttcttcagtgtgatcctgagagttggttgtccctggaagcctgcctagtgcctgtattgctggccctcctgccagttacatgagctctctctatctcttcctaaagcccttctggcttgaattggctaggctggatcctgttgtctgcagctaagaacatcctggctactgccgacaaagcaaagacaacagcgggcagggaaaagagatgtggagaagtggtaggagaggcagaaagagattcgggaagttggcaaatattttgaataatggccactatttattgaggccatatcatgtgcactatcttttttttgagacagagtcttcctctgtcacccaggctggagtgcagtggcactatctcggctcactgtaacctctgcctcccaggttcaagcgattctcctgcctcagcctcccaagtagctgggattacaggcacgtgccaccatgcccggctaatttttgtattttcagtagagacagggtttcaccatgttggccaggatgatctcaatctcctgacctcgtgatccacccacctcggcctcccaaagtgctgggattacaggcgtgagccaccgcacccggcccatgtgcactatctttaaccctcaccactctgttaggcattattcccattttacagatgaggaaacgggctcagaatggttaaggagcctgcccaatgccacacagcctttaacggtgaatcaggagctgggactccaatcctttgtgctcaaagcctaggctctccctagtttgttactttgtccaggccaacgctgcctgcagaaaagagtggaccctcctttccccattctttctgctcctcttgtcttccaactctcagggcccagacattcagctaagcctgaggaacaccacagtttgctcatctgggcttaaaaggctgtgtaaacatgcattagtcagcagcagcccacacactggaaaacattgatatactggggcaaacattcccagaatagatgacaaactaccgagtccaccactcaggggatgggattccaggagctatttgctttctgccttcaacaattgtgctatttgaattttttacacacagtaggtggattgcttctgttatcacatcatatattgcaattagtgacaccaaatcagttgtttaagagagaagggcaggcaagaaaacataaattgtgattatcattggatagtgagattatcattaatttttattttcttcttcatcttcttttttttttttttgagacagcgtctcactctgtcacccaggctcagtgcagtggcacaatcttggctcactgtagcctcaactttccgagctcaagtgatcctcctgcctcagcctcctgagtagctgggactacaggtgtacaccaccacatccagctactttttttattttttgtaaaaacaggatctcactctgttgcccaggctggtcttgaactcttgggtaacataggagcaatcttcctgcctttgcctcccaaagtgttgggattacaggcatgaagcaccatccccaccctattttcttcctttggcatttctgcattagacatatttctaagatgaccgtgtgctctcgttgcttgtagctgccacgaacagataaccctgactcaccctgggttgtgccatgaggacactgataagaacacacaactgcaaggcagaaggagggcctgggcctggccagagcagcaacgccacccaaggccacccaaggcagagatgctctttctgcctctcctctctgcagtccccgtgtctcctccatcacaggttgcatcccctcatgggtaccgcatgtctgcagcagcctgagaatcacacagcatccagacagagaatcacacagcatccagacagagaatcacacagcatccagacagagaatcacacagcatccagacacagaaacaggggctttcttttctggtgtctccttttttgttgttttgtttttttgtttttgttttttttttttgagatggagtctcactctattgccatgctggagtgcagtggcacgatctcggctcactgaaacctccgcctccctgcttcaagcgatccttctgcctcagcctcccgagtagctgggactacaggtgctcgccaccatgcccagctaattttttgtatttttagtagagatggggattcaccatgttggccaggatggtcttgatctcttgacctcatgatccacctgcctcggcctcccaaagtgctgggattacaggcatgagccactgtgcccagctggtgtctcctttttaagactgtgggaacccttccagaaccccctgaagtgggtcccaggcccactctttttttttttttttgagacagagcatcactgtgttgcccaggctggagtgcggtggcgagatcttggctcgctgcaacctccgccttctgggttcaagcgattctcccacctcagcctcctacgtagctgggaccacaggcacacatcaccaaatctggctattttctttgttttttttttgtagagacagaggtctcaccatgttgcccaggtctcgaactcctgggctcaagcgatctgcccaccttggcctcccaaagtgttgggattacaggcgagagccaccacacccagccacccaggcccactcttaagtcagtccctggcaggggggatgtgttagaatcaggtccacctgctggccaggcaggggccagcttccccggcttgtggagtggggtggacacctggacaaagttggggccttgggaaggaagatgtagcgaaacggatgccatgtagacggtctgtgtgtcctctatggcagattattttataattttaaaattttcattgatataaaaacatttaaaaaattatgcttgctgtgtttcgaagccctgttgaggactttggcaggagccacgtcgatgggttcctctatgaaagcttctgctccttgtggacgataatctcagcctgcacacaaataaaaaccatgtcttggccaggggtggtggctcacacctattatcctaacactttgggaggccaaggcaggtggatcacttgagcccaggagttcgagaccagccttggcaacatggcaagacactgtctctacaaaaaatatgaaaagtagccaggcgtggtggcgtgcgcctatagtctcagctacttggggggctgaggggggaggatcatttgcgcccaggaggtcgcgtctgcagtgagctgtgatcatgccactgcattccagccagggtgacaaagcaagattccgtctcaaaacaaaaacaaaaaccggaaaccacgtcttgtttctgcttcaggatattgttctctgggaacgtcaggaaccaaacaggtcccacaagccccacacttccttagctgtgtatcactgggtcacgggaggtaggctgctgaactggggcccctgtcttggctaataacatcccttttttcagctgtggtggttcaaaattacgttttgttctttgctgtgaaaagcgctaagcttttatcagacattatttgatgtagacctaaatatttaaaggcttggccaagataaatgaaatgatcttaaaggtgactcacattccagcattgcaaagttgagggttggagtgagtgaggccattggaggcagctcaggtttactgagtccatatattttctcagtgttcctttcagcaggttggaactggctgcaggagaaatcactgatccctttcagcatgtcgtacagtcgcttaactgtttaaagcaagtgacacagaaattaaggtgggggatctgatgtcttccatcagagaataagctttatcttatattgagatccaaattgccctagcagccttggctgctagaacataagaataagtggatttactattattattattattattattatttttattattattatatattttttgaggtagagtctcgctttgttgctcaggctggagtgcagtggcacaatcttggctcactgcaacctctgcctcccgggttcaagcgattctcctgcctcagcctcccaagcagctgggactacaggcgcccgcccggctaatttttctatttttagtagagactgggttttgccatgttggccaggccggtctcgaactcctgacctcaaatgatctgcccgcctcggcctcccaaagtgctgggattacaggcatgagccaccttgcccggacagaataagtggatttaaagaaagaaaagaaaaagaaaaaaaaactcttcttattattttcaccaatgatgcacaccttttgattcactcagcattctaaaattttagcttagtccttagattctgaagttgcaggtttttttttttttcctttcccctattatgtcatgcacatgacactcaggagctatgctataaatcacagaacaataaacggatagaggaataaatggaacattaagaatcatccaggttatttgtacttgctatttaaagaatgcatgagtcaaaccaattcaactgctataccgggaccatatggaaatattttggagctgaatgtgtccgtggtttgcctgctcagtaggatgtcccaggacacacaggcacctacctctgctaggctttcactcggggccttcctgtgctggaggcccctggccatcccacgtgccttatgtgcttgccaccaataggcttttcaccgtgacaccaggatgtacaaatcttgaaactggtgacctggaaggaagaacaaaaagccaaagaactgtgagttcaacagaaggaatggggccgggcggggtggctcacacctgtaatcccaacactttgggaggcccaggcaggcaaatcaccagaggtcaggagtttgagaccatcctggccaacatggcaaaaccccatctctacaaaaatataaaaattagctgtgtatggtggcgcatgcctgtaatcccagctacttggaaggctgaggcaggagaatcgctggaacccaggaggtaaaggttgcagtgagctgagatcgcaccactgcactccatcctgggtgacagagcgagactccgtctcaaaaaaaagaaggaatgggagtgcgataggaagagctctgtgaacactggagtcagactgttgggtttggattctctgctctgaaagtcacttatcctctctgtatcttggtgtccccatctgcgaaatgggctgtgatgaagatcatcgtgatgcttgtgaagtgcctagcacagggcctgggcctgatacaactggtagaaaatagagggaactgtgttcgttcttcaaggaaactgtaactgaattcaatagggtgctgaatttaggcatcacatggggaggcaggaaccatgaactggctcctaagttctgaatgatcggtaggggttaaacacgcagaactctttgtgcctcggtctccctgatatggaataataaactcaggttgccagaatcatagcggttccttgcatgctcctggaattgctaagaggctggttcccagagaagccctctgtgtgcccgagtgtgccatgtgagccaggtcaagctcttctccaggtgcacgggaaccttggaacaaggccagccctgccaaggacagcaacatcctttgttctctggctttctcaaagcccagagtctacaacgtgatgagcaagccagccttgcccttcccttggcattatttgctttgtgggcaatggtgatgggtgggtcaggcaggagtgggcaccctcggggtccaggaggctgactctgtggggtgcaggcacctttttcactgctctgggcttgacgaggctgataccactgccgggagagtgagcaggggcgcctcccttccctccaacagggatttcttttttttctctctctcttttttttaatttttatttattttttttctttttctctttatttcttcttttaaaaaaaagggatacatgtgcagaatgtgcaggtttgttatataggggtacacgtgccatagtggtttgctgcacctactgacacgtcctcttaagttccctcccctcacccctcacccccaaccaacagaccccagtgtgtgatggtcccctctctgtgtccatgtgttctcattgttcaactcccacttatgagtgagaacatgcggtgtatggttttctgttcctgggttagttttctgaggatgatggcttccagcttcatccatgtccctgcaaaggacatgaactcattcctttttatggtttcaaggggtctgttttcttttcttttctttttttgagatggagtctcgccctgtcacccaggctggagtgcagtggcgcgatctcagctcactgcaacctcggccccttgggttcaagcaattctcctgcctcagcttcccaagtagccaggattataagcacccaccaccacgcctggctaatttttgtatttttagtagaaatggggtttcaccatgttggccaggctggtctcgaacttccgaccacaggtaatccacctgcctcagcctcccaaagtgctgggattacaggcgtaagccaccacgcctggccaaggggttttttttctaaccagctgtagagggttgaatgtgggtccccaaaagatgtgtccaagtcctaacccctggtacctgtgaaggcgatttcatttgtaaaacagtgtctttgcagatgtcagtaagttaaggaacttgagatgagatcatcgtggatttagggtctacgatgatctcattttggtggctttataagagaaaggagagagatttgagacacacaagggagaaggtggaagtggagactagcgagaggtggccgcaagccaaggaacacccagggcaaccagcagccggaagaagccagaacagaccttcccagagctgcaggagggagcacagctctgccgacactttgatttcacctccagagcttacggcctccagaacagtgagagaatgagtttctgttgccctcagccaccagttcgtggtaatttcttggaacagtgcgtcaaccatgggtgcttcctgagccttgtgtggtgaaaagttcagagccgtaccttgtatacccgggggtatggaggaaggtcacacaggctcttggttttgcgtcagcgtggttgttccttcctggggcacaccagttctccccgctaatgtctagtaggcagctgggggtcacctcttagcaccagcacggcgcctgaccagaggccacaggggtgggcgggggtgcagagctggcagatgcagtgccttttaggacaagttatgcattcacacttgagcattttattttattttattttattttattttattttattttattttattttattttattttattttattatgttttttttttttttctgagacatagtctcgttctgtcgcccagtctggagtgcagtggcactgtcttggctcactgcaacctctgcttctcgggttcaagtgattctcctgcctcagcctcctgagtagctgggattacaggcacatgccaccaggcctggctaatttttgtatttttagtagagatggggtttcattggccaggctggtcttgaactcatgacctcaggtgatccacctgcctcggcctcccaaagtgctgggattacagatgtgattcaccgcgcctggccacgcttgggcattttaaagtagagtgagctttctgaacgtgaaggggtgatagagactgttgtgcccaactaagccagatgaccatctccccatgcacccctagccccttggagtccatttagcttatgtagctcataattatagacaatggtttgccaagaaattcctttgtatttttttcagcctgtctgtgccaagagccgtacaaatgagcattggtcttttaatcatattttcatgttggtcttttgaacaattttcatattgtttttctgttgggggaaatttaagatggggaaggatttatctaaatatagacgatgttgctggcaaccaactagagcggtaggcgggacgataataataatctatgtgtacagaacattccggaggcaaagctgtaggatgcctggcggtgggaagcatttacatagagtctaaccatttacaaaatgttttcatcaacattttcttatccaagcttaacaacccagtgagattttctgacaccaaattccatcagcatccaattagtatttttgtttttttttcctttggaggaggaaaaccctaaaagctgctttaggctactgaggtggctcaatcagacccacaggtcctgccaacgtggggaagggtgagagatggaattttcactgcagtgtgaagtgagcacatgtgtgattctcagctggaggtcacactgtgtatatagaaccttcccgggcagggctgtagggtgcctggttatgggatgcatcccaaataaggtattgaactgaaaccctctgagttcgaatctcctggtgaaacaggagatttgggggtctgaatgatcttctctttcacccacatcaaggaggacgtgggagagctctggcctctgatgacccctgtgtgtcttcagttctgcccgcagagctgaaggtggaggagggttttcttttccatggttagccttgagactattgctttaactaaatggattgaggctgcttgactgtttattcttcacccagtcgcgccttgtgatgtggcctctggtctataccctgttagcgcgacattccttcctgggggttaattaaaagcagcaagtcgagcctccctccagctgtttatgacccgcagctgcacagccaggggattcattgctggacttgccaacctaagtcctgatccagcaaaggaaagggagtgccaagcagctgcatcagtcggtgaagtgaggactatattttgtgaaacaaacaagccaaaaagaaatatgattgggtaggctatttttatttctctgagtgggaagctgaaaggcttggtggcgctcctttgtcaccctaaatctcatcagatgcaggctgtgctttctgctacagaaactcaccacctaagccaggccgcttccctggacttgatgtcctcgcctggtgacacgaggtacagtgctgtctaaaggtgccagtgtggggtggaggggtggtgaaagcatcagccccaaggatgcttcagctcagtccatgtggtggggggatgtgttttttatttatttaattaattaatttttatttatttatttatttgagacagcgtttcgctctgtcacccaggctggagtgcagtggcgctgtctcggctcactgcaacctccacctcctgagttcaagtgattctcatgcctcagcctcccgagtatctgggattacaagtgcgctaccacactcagctaatttttttgtattttttagtagtgacggggtttcacttcaccatgttggccaagctgttctcgaactcctggcctcaagtgattcacctgcctcgacctcccaaagtgctgggatgacaggcgtgagccactgagcccagcctatttatttatttttgagacaggttctcgttctgtcacccaggctgaagtacagtagcatgatcacggctcactgcaacctccctctcccggggtcaagtgagcctcccaagcagctgggaatgcaggcacatgccatcatgcccagctaatttttgtatttttgtaaagacagggtcttgccatgttgtccaagctggtcttgaattcctgggctcaagggatccgcccgcctcgacttcccaaagtgctgggtttacagactgcctagcctgagatgtgtgaaatgcactcagaataaaggcctcatcaaaagttcatttagttcaacccaacagatatttaatagggttctagaaaatgccaggtgctattaaaataggagaaaattagtgacgatggtacccaagcaacttacagttcaacagaagacacagatcccattcttctacggacagtctagttttagccaacatgccttatgatggaattgtgaagtgcatgggccaatggaaagaggcatcagaaaagccttcagggaggagctacattgggccgttgtggaaccgaataggctgtgtttcaactgctaggtgtctgtcctatagagcaggctggcaccttgtaggaaaatctgcttttttgtagtggatctctctttttttgagatggagtttcgcttttgttgcccaggctggagtgcaatggcgcggtcttggctcactgcaacctctgcctcccaggttcaagcgattccccagcctcagcctcccaagtagctgggatgacaggcacccaccaccatgcccaactaatttttgtatttttagtagagatgcagttttaccatgttggccaggctggtctcaaactcctgatctcagatgatccacccgcctcgacctcccaaagtgctgggattacaggcgtgagccaccacacccagctgtagtgggtctttctataccccagtgctcactgtgttcagagtaaattaaggtgctcaataaatgtttgttgaatccacaaaggaatgagtaaataaatgaatagagtggagatgaatataaaatcattctggacaaatgaagttggggacgagatttacagatgatcttgaatggtaggctttgaagtttaaatttaattctgtagtcaatgtactttttgcacaagggagtgagtctgtatttttgggagagaattctgctagtagtaggaagggtgtcctgaaggaaggaagactcttaggtagataaaccaactagtcatagggagtttgcctctccagattgaaatgaaatattttggaaatattgaaggttggatgataacttttgcagatccagcttcttggcccgaagttttcccaggtcgggaatgatgcactgtgttagctcaaggccactggattattgccagggctcaattaggaaatcgtgcctgtagggtaacctacattttctgtacttttccaggctggaaactttgccagatggcccatgtcaggagtatcagtcatgccttgcaaggctgtctttaactcttttaccaccaaatgccaaagtggtctcttcctttattaggcctttattctgcatggaatttttttttttttttttttgagccggagtctggctctgtcacccaggctagagtgcagtggcacgatctcactgcaccctccaactcctgggttcaagcgattgtcctgcctcagcctcccaagtagctgcgattacaggcatgcaccaccacacccagctaatttttacatttttagtggagacggggtttcaccatgttttggccaggctggtctcaaactcctgacctcaggtgatccacccgcctctgcctcccaaagtgctgggatgacaggcgtgagccactgcgcctgggcaagtctgcgtgcattaaacacaaccccccagcatgggctctgacatgtctctgtaactgactgaagtgaagcacaaatgccagggcgtataaggccaccagaaaatacgaagtaagtgcccctgggtctcttggcacagcctagataattagctggccctgactctcagcattgtttaaaggcattattgagcattatctcttgtttcttttgctatggtagtgaaggggttgggctctggaggctgaaattttagtttaagattgtcacttgccttccactgtctttcttggagtgacactcccctaaactataccccaatcctccttttttttttttcttttttctttttttttgagacagagtctcactctctcgcccaggctggagtgcagtggtgcaatcatgactcactgcagcctcaaactcctgagcccaagtgattctcccacttgaggatcagcctcccgagtagctgggaccacaggtgagtgccactacccccagctaatttttatttttactttttgtagagacaaggtctcactatgttctccaggctgttctggaactcctgggctcaagtgatcctcctgcctcaccctcccaaagtgttgagattacaggcatgagccactgcacctggctgcggtcctcttatgccacaggttcccatgctgcttttgttatggtagagaagaggttgagctctggaggccgaaatttcagtgactcctgatattttgctaagagcaatggagaagatatggcctgaggacccagcaacggcccccctacctcaggttaatcctgccgggggcgggaatgtgtcctgccacgatgcttctgcccacctgtcggtgcctatgcaggtgtgaccaggctgctgacactgcgtcctgaggtcagctcgaggcggccaagtggaacggcagcttcagactcaggctcctaatgggggcttgtctgagcaactcacagtgtcttgctatggactcttgggaatcctgtgcttcggtcccaagggcacctggtatgtgtagcctttacgcggcacccatcaaggcttccattcaccaaatgagaggcgacaacagacaggtgaggagaactcactaataaagatgctctgtgctgggcacggtggctcacccctgtaatcccagcactttgggaggccgaggcgggtggatcacatgaggtcaggagttcgagaccagcctggccaagatggagaaaccccgtctctactaaaaatacaaaaattagctgggcgtggtggcaagcacctgtagtcccagctactcgggaggctgaggcaggagaatcactagaacccaggaggtggaggttgcagtgaactaagatcatgccactgtactccagcctgggcaacagagtgagactccatctcaaaaaaaaaaaaaaaaaagctctggaagcgaggggcacagtcacggtgtttcagagtgcccactctcgtaattcgactttaaagggatcctgtctgaggaaaacaggaggagtgctgcaagacaagggcagcagccttctctttctctgctgcagcgctgcggtcccaccaacctgccttcactgtttgttacctgatgtcacttaccctgcccggtgttgactccaccctgttcagcctgtggatgactattagcccagagaacagagaaaggaacagtgccacttgaacacaacatgcaacacacacacactttttttttttttttggagacatggtctctctctggcaccgaggctgtagtgcagtgctgcaatcatggctcactgcagcctcaacctcctgggttcaagtgatcctactggctcagcctcccaagtagctggaactatagatgcgagccaccatgaccagctaaattttaaattttttgttgaggccgggtgcggtggctcatgcctgtaatcccagccctttgggaggtggaggtgggtgatcacttgaggtcaggagttctagaccaccctggccaacatggtgaaaccccatctctacttaaaacaaacaaacaaaaaatacaaaaattaggcaggtgtggtggcgcatgcctgtaatcccagctacttgagaagctgggcaggagaatcgcttgaacccaggaggcggatgttgcagtaagccgagattgtgccactgcacgctagcctgggtgaccgagcaaaactctgtctcaaaaataaattaaataaataaaataaaatactttttttgttgttgttgagacagggtctcactgtgtttcccaggttggtcttgaactcctgagctcaaataatcctcccacttcagccttgtaaagtgctgggatgacaggcggtagccaccgtgtccagctgcaaacaattcttatgttctgtttttgttttttgtaaaaagattgtgtcctgtcacattggcttgagtatttacactcattgtcctggtttccattctctcctcaacccactgctgcctgtcttctgtccctgaagcctggtgaattcatgtctagcaaggacaccagtggccctcttattaccgaagcccaggagctatcttatttctcgttctgttacccatcttttggctctattgaccccataccacttgacactgttggggagcagggcatcacttctctctcctggttctccttccacctctctgcttatcagcatccttccctggttcttgttcacatcctgactcttaatagttggagttctttagaattctgctcttggttttctttgcatctgagtgataccatactcccaccagtaacttcattcagccttggataagttcctgcctagtcaactgtttctgttctgtgaggctttcctcaactccccagagactggctccatagcactgtccctatttctcatttctagcacttatcacactgtgtatagacttagtttattctgtaattctttctttctctctttgtctttctctctttctttctctctttctttgtcttccttccttcctttctttcgagacagtgttgctctgtctctcaggctatctctcaggctggagtgcagtggcacaatcagggctcactgcaccctcaacctcctgggttcaagtgatcctcctgcctcagcctcccgagtaacaaggactacaggcatgtaccaccatgcctggctaattttttaaaaattgtttgtagagataggggtcttgctatgttgtccaggctggtctggaactcctgggctcaagcaatccttccaacttggcttcccaaagattgcaggcataagctatgtatctggcgcctctctctctctctttccttctttccttccttccttctctttcttttctatttttttgaaacagagtttcgctctgtcacccaggctggagtgcagtggcactatcttggctcactgcaagctccatctcccgggttcatgccattctcctgcctcagcctcctgagtagctgggactataggcaccagccaccacgcccggctaatttttttttttgtatttttagtagagacgggtttcatgtgttagccaggatggtttcgatctcctgaccttgtgacctgcccgcctcggcctcccaaagtgttgagattacaggcgtgagccactgcgcctggccccttctctttctttctttctcttttgctttctttctttttcttttctttcttttctctttccttccttcctctttcctttctttctttctctctttttctctctctcttcctttctttctctcatcctcaccctgccctgccctccctctccccttccctcccttccttcctttctctttcttttttctttctttctctttccttcctccttctttcttttgaaatttttcaaacacacattaccactacattttaatagtttgattgtatccttgatgagagagattgttagtcgccaccaatattatacatcctttgcttctttcttagcaacagaactcaccgtttgtagctgggtgtgtggtcacttggcacaggctacatttcccagccttctttgctcttgggtgtgcccatgtgattaagttctggccaatgggaagtatgtatgtttgcttatgggtgtgcacgcatgtgtgtgcacgtgtttgtacatgcatatcatttccaaggaagcgtcgttcggggagcaggtttgctcttcttcaccctttcctccgacttgctggctggagggggaagacacactgtggtaatggcaaagtagcaacacagaaggggcccgtgttaggccattctcgaattgctataaagaaatacttgagactgggtaatttataaagaaaaaaagtttaattggcattcttaagagaaagcaataatttctttttctttctttttttttttttttgagacagagtttcgctcttgttgcccaggctggagtgcaatggtgcggtctcggctcaccgcaacctctgcctcccaggttcaagcaattctcctgcctcagcctccagagtagctgggattataggcatgtgccaccatgcctggttaattttgtatttttagtagagacggggtttctccatattggtcaggttggtcttaaactcccaacctcaggggatccacctgccttggcctcccaaagtgctgggattacaagcgtgagccaccacgctcagccacaagaaagcagtaatttcttagtatcattatatgttcaaatagtgcttaagaggttccacaggctgttcaggaagcatggcgctggcatctgcttagcttctggtgaagcctcagggagcttttagtcttggtggaaggagagaagggggaacaggcaggtcacatggtgaaagcaggcagaagctccagagagtagggggaggtgccacccatttttaagtgagaagatctcatgtgaacttagagagagctcacttatggccaaggggatggcccaagccattcatgagggatctgatgacccaaacgcctcccaccaggccagacctccaacactgtggattacaattcaacatgagatttgagttcagactatctcagggcctacattcctgatcatgaggaataagaccacctgcatccacacagcttagccatcaggactgagacctaagatctctgtgtcaacatgacttactatttgatccaggagattcttgttcaggaatattagactgtaaaccaatacgtgctttcactgtttgcctcaacaaattcctgaaaaagcatttattgtaacaaaagattgcttatctttacatataacccccttctctggataacagtataaccacccaaggggttcaccttccctgctgcctagagagagctgattcatcaggacaggaggattgcaatagagtcattcacacagagctggctgtgcaggagattggagttttattattactcaaatcagtctccctgaacattcagggagcagagtttttaaagacaacttggtgggtcgggggaggccagtgagccaggagtgctgattggtcagggaggaaatcatagggagtcggagctgtcttcttgtgctgagtcagttcctgggcgggggccacaagatcagatgagcctgtttgttgatctgggtggtgccagctgagccatcaaggggaggatctgcaaaatgtctcaagcactgatcttaggagcagtttagggagggtcagaatcttgtagcctccagctgcatgactcctaaaccataatttctaatttgtggctaatgttagtcctacaaaggcaatctagtccccaggcaagtaggaggttggtgggcagggtgctgtggttcactcctgtaataccaccactctgggaggctgaggcaggcagatcacaaggtcaggagtttgagaccggcctgaccaacatggtgaaagcccgtctctactaaaaataaaaaaattagctgggcactcgcctgtaatcccagctactcgggaggctgaggcaggagggcaggagaatcacttgaacccaggaggtggaggttgcagtgagccaagatcgtgccactgcactccagcctgggcaacagagtaagactccatctcaaaacaaacaaacaaacaaaaaaacaaaaaaaacctaaggaaaaaaatagcaaaaagtagccaggcgtggtggcacatgcctgtagtcacagctactcagaaggctgaggtgggaggttcacttgaggccaggtgatgatgctgcagacggctatgattatgccactgccctcaagcctggggaacagagtgagactgtttcaagaaaaaaaaaatggaaataaagttttttgtgattggttgatgtctcaagtctgttttttcttcaaaatgtttaactgaagtataatatacatataaaagcttgcaaatcataaatgaatgtatggctcaacaaatttcccaatctcttttaatctatagattgaccattcccctctttttttcctttggaatttgataaagaatatatttgtcttgtaccgtttcccacagtctgtactttgccaattgtttttcatggtgtcatttagcatgttcctctattctgtatttcctgtaaactggtggttgcatctagaagttcagcaggtcaggtgaatttttttttttttttttttttttgacacggagtcttgctggagtccagcccaggctggagtgcagggcaggtggcgtgatcttgcctcactgcaacctctgcccaggttcaagtgattctcctgcctcagcctcccaagtagctgggattacaggcatctggcaccacacccggctactttttgtatttttagtggagacgaggtctcaccgtgttgaccaggatggtctcaaactcctgacctcaggtgatccacccacctaggtctcccagactgttgggattacaggcgtgagccaccgcaacggcgttaaagcgtcttttgaaggtggatgtgatttttttttttttttttgggacggagtctcgctctgtcgaccaggctggggtgcagtggcgcgatctcggctcactgcaagctctgcctccagggttcacgccattctcctgcctcagactcccaagtagctgggactacaggcgcccgccaccacgcccggctaatctgttgtatttttagtagagacagggatttcaccgtgttagccaggatggtctcgatctcctgacctcgtgatccgcccacctcggcctcccaaagtgctgagattacaggcgtgagccaccgcgcccggccggtggatgtgatttctacaaacaagcaaaagccagtcagactgaatgtagtgaataatgtaggtgacccagctggaagatgatggtttgacgtggaacacaaggggtgatgaggccatgaatgatttgcttgtgtgtctggtaaactggctttgatggaaattcctaaacaggtccaaaaacgttctgtccaatggcagcatgaaatgtacagccactcagggtgactaatgtgaacggaacaacagtgactttgacagtgaaattgcatgttggttataaaaccagctttgctgtgtgggtgggcatgcgaggtgcccctttctagtcatgagctcctcttaaggaccccaaaatgtctcagtggtaccggattgaaaattggggctggacggtgctctcctgctgaaattcgggagctacttagcagccccaccttggcaccctcgtttccgaggggcaggccctgggcgcgcgtctcagtttcaagcccgcggcccgacactagagccgtctggatgtgttgacaaggatgccgctgggctccacccgggctcacccgggccctcccgagccctgggccgcgcagcaccggcgtccgcctcctccccattactcggcgagaatgcggtcggggcactggcgcgagcagcctggtgctcctgaacagtcaacaagaaatgaggaagcacgggggcagccgccagggcgaccagaggcaggcctcagagcagcagccatacgggagggccccggtggttttgacctcccgcaaacttcccttttcccgctcagccgaacccctcccctgcacgccggcagccccttggggcttcactccgcctccgcccgctactcgcgaagcccagcccggccccgcccccaacaagtgacgcaaaactgggaggggccacgaggacctcgggcacatccagcagtgcgacggggccggcgccttctccgagctcctcccacgctcgcgggtcggagctcgcgcctgcgcagttcgggccccgggtgtcctcccccctcccctttcttagcaaccatcgcccgctcccgcccccgctccctcggccgcggccgcgcacgcgcgcccctcccggcgcccggccccgcccaccccgtcacccgtaacaaccacaagtgccgtcgccgcgccccttccccctcccgcctccccggccccctccccggaaccggcggtcgagctacggtcgcggagcagtggaaccgagactgccccgcggagccgccggtatgagcgcccctcgccaccccgtgtcccaggcccggcctttctgacaagaggtaggcgcgtcgtcgcggcgggtccgagtgcgccctcgccccggtcccggtctccgtggagtccggcgcctctcgggcgggccccccggaactcccggccgcccgcttgctgagcctgtccctccccagccccggctgccatcggcccggcacccgaaacgggccgtgcccccgcccccctgctcgccctccgcccccctgctcgcccctcgccgcccctcgcccccctcccccgcccccacccccacctcgccaggcttccagttcccgggagccgctttttgctgagagcggagtttcgggtccggagccagtgcccgcccctctctcccgtcggtcggggctttggccccgtggggctcagccgcgcgggacccctgctgagcagccccgggcgccggccgcccctcgagcctgctcgggatgcgttcagtgggtctggcctttggctcctgtttaaacagcgattgtcatgcaatggaggccgtccggctcctggatgccacttggtcgttgtcactccggatgcccgcgtagggcgtttatctggaccagagcatcggcagctgagacctggctgtggttcacaagctcgtgaattagcaggttcttaagtgagtgtagccagttctgccaggcggtggaatcctgaatggatgttaccgtttcttaaacgagcattacgcttttttgcttcttcccccaactcttgtttgtacccggttatcgtcctcatatctgggagagtaccctaaaattaatattcccaattaaatttttaaaagatgattggattcccactgtgcaccaacactgtaaggtttgcaaaagaaaaagaacgtggtcccagcacatcaggatgtgtcagtcgcataatcaagatgaatattagaaaagcttcaagttgagtttggagaacttgggagtttggctctcattctcatggttttagaggtggaagtctttcaagatcatctccccgaaaacctcattttacagagatgaaactgagtcctagggaagtcaaatggcttactcgtggtcacccagagtcattccttagccgttttcacactgtcagatggcgatgttttccaccatgacctctcctctgagaggtatgccagacataccagagaaagttccaaacctgtttaaaccttagtactatagatgggaattctataccaggcgccgtgactcatgactataatcctagcactttgggaggctgaagtgggcagatcccttgagcccaggagtttgagaccagcctgggcaacatggggaaaccttctacaaaaaatatatatggtggtgcgtgcctgtggtcccagctacttgggaggctgaggcaggaggatcacttgagcttagaaggtggaggctgcagtgagtggagattgtgccactgtgttccaccttgggcaacagagagacaccctgtctcaaaaaaaaaaaaaaaaaaaaaggaatcttggaagtttctgaaataaaatacatcttggtaatttgtctctctcttttttttttaacagctagacttcgggctccttgaggatattcagttttgtatgtttgaatatcctctcaccatgttcagcataaagtaccattcttaatgattatcctcaacaagacaggtaggctcattcgatttttctttctcactttaaataggggagacagaggactggcaagtccaggtgtgtttttagagcaatccgtgtaggctggcgctagagaatgattatgcacccataaggagggctccttgactgtgaattaggtgtgaacatttaaccgattacttacggatattagctatctgaggctagagatttcagtggagcctgtttagccagaatacttggcatctctgccactcgaagacaggtcgccaaagctgtagtgtacacagttagaaaataggaattgacacgtttcctttgaagctagcttttgaggagtattccatagtttgagatacagtagtatttttttccagttttatttttgttttcccagagctaatatcttaacacgagatcatttttatttggcttctagtagaagttgtttaagagaaaatgatccaagcattaattatattggttattagaataatagaatcataacagttcattgctggaaaggactcaggtcaggtcatgtaatgaatgcagagtcccagtaagccaatgagaggattggacccctctcacaccagtactgtttgcctcattgcattggggctttgtctgctttttcttattgtttaattacctccccctgccctcatgtatttaaatatcatcttttcatttttgtgtgcatagaattatgacctattgtggtctctttctgtcgttagagtgtggtatgatgtgtcagtgcagacttactaataatttgtttctgcattgtggttacttatcacatatatttatgttttgcaggtgtgagagggttgctgttgtattgcaatcatggtgcagaaataccagtccccagtgagggtgtacaaatacccctttgaattaattatggctgtaagtacttgacatttcaatttactctttggcttcttatttataaagtacagtgttagaatttgatgatctatagatttattgttcgtctccatggcatcacttgaacttactctgtttttatgcttatgaaccgtatctagagtgtgtaaaatgtttttaaaatacaagcctctgaaaataaaaatctgcttattaaaaaaaatgcacctcagggtaatgtatgaattgaagttaattctccctttgaacacacagaagtgggattctaagcacttcttcctcggggttgtgctctttttttccttcgttagagtagcaaagggacatggagtgtggtctttgctgctcgtgtggaagagtgctctgcctatgggtgaattcactttaggtggtgttagaactgagcactgtgcgatggagttttactcacgattcaaatgactctgttgaatgagtttttccgttatttacctgaagaatttggctgaaaataagcattttactagatgcaaagcaaaccttttccagtcatttttagattaccgtagggtatttcttcttttcctttctcttttgtgttattattaagatataacatacataccagaaaatataatacagacaggagaatgtgtctttcatgagcacacacctgatgaaaacgtgtgtcacactcagcacacctgggatactggcaccaaggtcaggaaccagaacatggcaacccaggaagaagtctcccctggttcaagtgagccactgttttgactcctaatacacagaggactgttacctgtttctgttccttctataaatagaaacgcaggtgttttagcagctggctgcttctgctcagcgtatgtttgtgggatttatatagatcaatagttttgaaaaacaagaagtcctcttacgggaagaatttacatgacagggtttgttttaaaatttattttatttatttttttgagacagcgtctcactctgtcactcaggctggattgtagtggcgcgatctcagctcactgcaacctccatctcctgggttcaagcgattcttctgcctcagcctcccaaatagctgggattacagacctgcactaccatgcccgctaatttttgtatttttagtagagatggggtttctctatgttggccaggctggtctcgaactcctgacctcaggtgatccacccgccttggtctcccagagtgctgggattacaggcgtgagccacctctcctggtctatttttatttttattttttgagacggagttttgctctcgtccaggctggagtgcagtgacgcgatcttggcttactgcagcctctgcctcctgagttcaagcgattctgcatcagcctcccgaatagctgcgattacaggtgcctgcccccgcacctggctaatttgtgtgtgtgtgtgtgtatgtatgtgtgtgtgtgtgtgtgtgtgtgtgtgtgtgtgtgtatatatacacatatatatttgttttgttttgttttttagtagagatggggtttctccatgttggccaggctggtcttgaacttctgccctcaggtgatcctcctgccttggccttccaaagtgctgggattacaggtgtgagccactgtacttgagatataatttacatacagtgaaatggtcacgtgtcaggtgtacagtttgattagttttaacaaaagaatccctcacacctttgtgaaaacacaggacatttgaatccatccccctggtgaaggttctgtggtgcgccttccctttcaggtgtgaggttttggtttgtgtgtgtgggtaagaagctctgtgtgttaagatgtctgtgtgttaagaagttacgtgtgttaagatgtagttacacatcttaaatatgtgtagctagggctgttaacagtattttatgttgttgacttaccatgtttgccatttgcatgttatctgtgctgttttggcttttggttgtatgaggcaaagacccactccagccagcttgggaaggagtttggtgagtgggaacatgtatagtgtgataggaatcacacaggaatccgggaattcgagctgggatgggctgagctccagagcctggtagtggagggaggttcctggctgctctgggggcctcagccacagtttttctctaggattttgccctgtgggactgtgcctggctccatgtgctggagccttctaccccgccaccagctggctgctttgctcactcctagttttccatgtggcttcagctcgaggacgtgcttagctgtctgaaagccctctggccccagttcaactctgtggcatttcttgttgcattctttcagtttctaagtgaccaattcctgtcacatttcatagttcacatccttgagagaaacttgatctagttcattccccaccccgacccctgccctggtcctgggtttgaggatattggctagcctgtggattgtttgccttaggtgggaggcctgacccttgttcagtgagctgggctggtggagctggggaggaggcagtgggggtggtaggcagtgggcatcgccaggtaaagtagagtggctgcccacggcccggggtggacacagggcagagagttgggcagggtgggggatgttctccaaaacacttgagtgtggcttaaaaagttcatgcaaccctgatagtttgaggcaaaggctggtttctttgccaaacgttagatttaataaaagaggaggtgtttggattgtttaacgttcagacttccttatttcccttacttcactattttcaaaattgtgacgtttaccttgccagttcatgcaggactttacagaagaactcgaaattcaaattctgagctgccaccaagtttttacaattaaaccattttaaaactattgttctgaggtagtggttaatttcccttctttttctttctttcttctccttttttttcttttttttatgatttaaaacttactagttagaaacttttttttttgcctcaccagcttcaggaaattttcttttgaattgttagaaaaacaaacaaacaaacacacagacgcacacacacgcacgtatattcttccaccctgtagtataaagaaaacatttttaaatccgaaaatgaaatatgttacctttttccttccaaaagtagactgtgagtgatgtttgtgtggtgtcctttgcccccatttcttactgtagttttatggtataaaatcctcagtatttgcttaattttttttgtcattgaggaaaactaacagtaaaatgagttaacctgaaaatgcccttttcagttcagcattcagagtgaggaaagaggtatatatgcagttaaggtgagaacggaaccgtagcttccgccggcggacttgtgagcacgtcagaaagcgaatgtgcctcactagaacgcacggtggcggcaggagtggccggcagtgcccggcacgcagtcacgggaggtgggtcgagtcctggtttatgtgagtcctgtgaggtgagagagtgggagaaaacgcctcactcaacttaatgcctttgtttgtttgttttaaccaagagtttacttgtaatttagtattgccggaaaattgttcaggtaaaaagtgcctagtataaataggtacacagtcaggtcagatatgttaattgcatctcacttgatttaatgaaaatttaccatttgttttgaggtcagtaccattaaaaaaaaaacatgttaaagttctcattaactcgcttgagtggtatttacataagcaaaattgaagtggaggtttttcagtaggcatttgcatggtgttgttttgttagatatcagcccagaaacagaatgtcagagctttcagcgagttggagcaatcacctagctcaaccctcccttggagggcggggaatctgagactccgaggtggtgaaacttacacaggtagtgccgagatctgattctcgagtttagtgttcttttctcatactatgcttcttccttctacccagggatgtgtacctgaaacattttatgaaagagaaatcaaaacttcttggccacacacaaacgaaagcctcacacctgacaaggaaggcgcaccagggaaccttctggggggatggttgcagatgtcctgtgttttgacaaaggtgtgggggactcattttttaaattgagttataatttacatacaatgaagtggtcacatgtcaggtgtacagtttgatcagttttaaccaaagggctgctcttcctggcttgcggggaggagaaattaatcagtgaaggacactgattgattgtgccttaaagggtttaagatctcacgggagcatagtgatatgatcccacagattaggaacttagaatgggatgtataattctagggtgcttgagttgaagtgtttctttttgaaatttctaagataaagcacaaactttaaaagttaaacattgtcaagtgcatctccccctccccctgcatgttaatggttccttaataaaggcttcaaagggaaaatgaaggaggcgggaggccacctagtgtaggagggcagggtgggagaggtcaaggtcaggagcccttaaggagagttgtgggagagagggaagaacatgagaggccaccttctgaacccgatttttgtggtgacagccgcaggcgagatagtggcttggactctggtctttcttctgctgaggacagctgtcctcattgtgaccagtgggaacacacgatagaagaggctccattagctcctgtgcatcccaggagttgccaccctgtccagtgccgtttctgtctgggcttatttccattacacagcagatgtggtcacctcattctttgctctctcctttcctcgccctcatcccagtttcactgtgccctaggagtgctggctttctccaggaaccccttcagtgtctctgtcccttcagcagacacaccctttagactgtgccttcaggaaccaaggcacctggttctgtccctgtctgtcccagcactgccatcgttgcagcgtaagcccctccctttgcagggaaagaccaggggtcccttgttcctttgcgcactcacatctttcatcccttaggtcactttgtgctcccctgccacacactttccattgtgtgtgtcctgtgttgaaggctttcctgttatccgtcctcgcacgtctcagctcctgtgcttttttcggcaaggccatttgtggctgtgttctgcctggtccgtttaaccttatttcataattatgcacacttcccagcttgaacttgaacatttgtttctgtcttgttcccgttggcccggacacacagtgctgtttcctgccccctcttttcttttttcttttcagacttctttgcctcagatgtttgccattccccatctgtctctccagatcttacccatcttgtccttccacacgtccccgatgcctctgaagatgccattcatgtttctctcccttccccgggacacattcttaatgttggagttggtgttaggtactttcacttgcaatgggagtttctttattcacaaagcctcttgagtgttgctctcatactattttgtgtgtccttccagggcagtgaccttgacagttatttgtcttgttctcccaagcgcgggtgctaaggacatagtctgtgggcatgcagatgtgtgtgacttgttcacacgaactgtgaggatgaggacttggtgaatggtggaaattcagatccaaactgtatctccagggcatgatggcgcctgtctgtagtgcagttacttgagaacttgggagggtgagttgggaggatttcttgaggttccaggagttcgagaccaacttgggcaacatagcaagatcctgtctctataaaaaaataaaattaaaataaatggtcatggtggtgtgtgcctatagtcctagcttctcaggaggctgaagagagaggatcctttgagcccaggagttcaaggctgcagtgagctatgatcacaccactgtactccagcctgggttacagagcaagaccctgtttcaaaaataaataaggaaataaaatgcatctctaattctgttttcagacaagagatttatgttttctacatggaacagaagtaacatgctatggtctttcagttaaccagtgggtcacctgggagcaaagcccttttgtgataaagttggctgatttgtgttttttttttttttttttaattttcgtaaacgttgcaaaaccttgttggtaaacactctcctggcagtttaagtggtgtgcttttccaggttgaataaccaaaaaacctgcttaccagtgtataggttttgtttttgtttttgtttttaaatactgctccttgcggagcagggctgacccacaggcagtgctctcagagtaaccacagttgtcgattaaatggcccgagtacaaaagaatttgtttcgctctcctgctcctcttgctttattttgttttgtactctggcatttggggttttttccccctttcctctcaggtgtctcatgtcttcccattaagaccggaggaaggaagagaaagagatttgctttgaggccaggtacaaacctgtgcctgccacagaccagctttgtaacctgctaggccagtgactagtgtaagactgctgtgaggaggtgctggagtgaaacagacagcaggggtgagggtaggcaagggcgacctggtgatgccacagtctccccctctcccttccagataccctgccccttctcacctccaaataccaggggaactgaatcagtttataagtgagtaaatgactatgaatgtgcatctctgttagatcaaataggcatttatattgaagctctttcatccattccaatttcatatacaaaacagggagacgtgagggatcccaggatggactcgcgactcatatatcttacttcagggtgaggagacactgctcttccttaatcagggcctccgtggagtgcgaaatgcccgagggagaacactttctgacgggcagctgtgcccatgttgggcagctgtgcccatgtcgttcctctggttggttgggcagggggcacaggtcctgctttgccctttctccatctttgtggcagctagctgcgttcagaaaccatccatccgcccacccgtaccttgcctgaatattctctgagctgcctgtccccttttctctaactttttcttcctctgactgaggtcctgtgcacgtcagattttcagcattgttttagttacaggaaatattttcagtccatcgttcatcttctcagagcatgtcttctttctctcatcctggatttcatccttgggcctttttgtatttctgattctggtttttttagtttctgatggttaggtgtgatattgaaatacatcttttcattcatcaaggtattcttagatcttccagcagcctaatgtgcagtagaatttgtttttacccaaacgaataagcaatctactttttggggtaggtgacttaaaacccaactttgttcaagtctggaagtggagggaaatgttccattttctcctatgacatataaaaggacctggtcaatcagtgggagactgtgctgccctcgtttgtaaagttgtgaatgccatcgcgtgagtcctattgcatttcatcaaagctggggtggtgtaattagtcagatttagttggttttgaaaatggacaattagagtgagctttcatcacgtgctcctttgtacagagccagaccttctcccttgtgttccgtctcagcattatgcattccagttggtttttccccatgcttttcctgagctgtatccaagtgtctttaatgcgctagagtgaaggcagttgtggtgcagtaggaaaatatttcaagcagaaataagatgtatcagattcagcttctcgcctctctgatttacctggtttttataaaaacaaacaaaccccaaaaccttgttttatggaaaatttcaagcatacacaggtagagagaatcatataataaatgccatttacccatcacccagtttcaatgttaccagcatcttgccgggcctgacacagtggcttatgcccgtaatcccagcactttgggaggccaagtggggaggatggcttgaggccaggagtttgagaccagcctgggcaacgtggtaagaccctgtctctaaaaaacaaaacaaactcttgccaatatttttatcagttgtacccacttttttctttcctggtgtattaaagcagatttcaggtatcttgttaatttgttgacaaatacttcagtgtacatctctaaccttttgcttatattatttttatttttttgagatagggttttgctttgtcacctaggctggagtgtagtggcacgattatagctcactgcagcctcgaactcctgggctcaaggagccctgcctcagcctgctgagtagctgggactacaggctcacaccaccatgccagctaatttttctttttttaaatttgaaattatattcctgttgcttaagattactaaggcagacttttttttaaaccaaaatattcagtctccatagagactgtcagaaatggtcagtgctggctgggcacggtggctcatgcctgtaatcccagccctttgggaggctgaggcgggtggatcatttgaggtcaggagtttgagaccagcctagccaacatggtgaaaccttgtttctactaaaaatacaaaaatcagccgggcgtggtggcaggcagctgtaatcccagctacttaggaggctgaggcaggagaatcgcttgaacccaggaggcagaggttgtagagagccgaggtcatgccactgcactccagcctgggtgacagagcgagactccgtctcaaaaaaaaaaaaaaaaaaatggaaatggccggtgccagctctattgcaagttatcttgtggtattgggaagttttcaatgagcaataatcacgtctcgggtaaacctcactgactatgatggggccactgtgcagagagcctttctcctttttaaacacagccgccatgttgttatcccacctaacaaaagtactagtgatgcctgatgatcatctaatacacagttcacgttcatgttttctcacttgtctaaaaaatgtctttcataagttgcttggatcctgcttcaaataaagccatttgtatttggttattatgtttcttgggtctcctttattctctaacattctccctttccttttgtttcctttcatgccattgatttgttagagaaactgggtcatttgtcctgttcagttaccttaaccttttgctgatttaattgttccttacagcaaataggctgtaaggagaaggtgtggacctaaattcaatcaatgcagccaccctttagcagttctctttatttatttattattattatttttttgaggcagagtttcactcgtcacccaggctggagtgcagtggcgcaatcttggctcactgcaacctccgcctcccgggttccagcgattctcctgcctcagcctctgagtagccgggactacaggcatgcgccaccacgcccggctaatttttgtatttttagtacagatggggtttcaccacgttggccaggctggtctcaaactcctgacctcaagtgatccaccctccttggcctcccaaagtgctgggattacaggcgtgaaccactgagcctggctagcagttctgtttaaacatttgctggcagagatggaaactaatagttaaaaccagctgctccccttttcttcctaggattgttctatataattttgagttgcaaataagatgcaaaatatttttttcccaaattaaactaggccattctatttatggttactccttatttatttatttttgtagttactttttaacactgaatgggtcctcattttgtactgaaagcaggtgagagggattaatttattggcagcgtttctatgtagtgcatgcagcaggcacttggcaggagtctggcctggggctgaggaggtgggtggtgtttgtggtctgaggtgtccagttgtgctgggcagtcagtccttgccctcttctgttgtctcttttattagagctctggatagggctgttgggctgcctggggaagcttccccagagaagttcactgtagagaggattttggttggcagatgttataattgatccatctctcttgatttttgacctgtacgctagtgaagcagacacttttatatagttctagtggaattattttgcatgttgtaacaagaagcatatattgcgttgtaattttcttgcatggtacaagttgatgtaagaggacagcagccctctgtatccttgtgttctgcacccacagatacaaccaaccgtggatcagaaatgttcaggaaaaacaacaaaaataatacaacaataaactgtaatacaaataaaacgcatgcaacaactatttacatagcatttacattgtatttggtattataagtaatgtagagagaatttaaagtgtacgggagggctgggtgtggtggctcacatctgtaatcccagtgctttgggaggccaaggcgggagaatcacttgaggccagtagtttgagactagcctgggcaacttagcgagactctgtctctatgataaactgaaaaaaaattagctgggtgtggtggcgcatgcccgtagtctcagctactcaggagacttgagacaggattgtttgagcctaggagtttgaggctgcagtgccactctggcctgtgtgaacagagcgaggccctgtatctaaaagatgtgtgtctgtgtatatgagaggatgtgtgtaggttaaatataaaatgtaaatgccactccatttttatatcagggactggggcatccacaggttttgggattggagggacatcctggaaccagtcccctccagataccgagggaggactctactggccccttctggttttttttgtttttttttggtttttttttaagaaaagtctgtctctataattatgtatcaatatatgaaataattgctatgtgtatctttatatgtactggatccattttccattcagacatctgccctgtttttcagtgatctgtactgccatgtgtatcagtagaatatccgaggtactgataagcgtccagtttgtaaatgtcttgtgtatttcagtagatggctgcgtccttacttcttttccttttaggggtccggccttccccttctgatctggactttctttattccactttcttgccttattaaggtgcggatggattgtttgttccttttcctctgattttgctgtttggggacccccagttgtatattttgcattttctggcaataataggtgttttaatgagcagttaatgctattttaggcatagctatctggctctcttactgggcagcacttcctgggcagccccatttaaacctgtggcttcacctgtcactttataaactaaagatctcaaagctttgtcttcacccgagatgccccccaggagcttccaaactccaagccaggtgtctggcagacatctccatttcactgtcccaggcagatttaatgcctctgaaacagagttcatctcctcttgcctgcgcaaaaaacacacaccccaacagaaacaaacacacacccacacccacacacccaccccagtaaaaaccaaaccaataaaacaccactcagaagctctccctttcccctgagctgctgctttagatgtgtggccccgcaggtaccttaccctcagagcagaaatccaggcatccctggcagccttccttcctcacccctcagtcttgctggtgcccagatgggagctggcagagatgtctcctggatgggcgctcactttgctcttctgtagccttggtggcttagccccagaccactcctccttacaacagcctctggaccctgagtctacccctcactcttctgctcgtccttggggctgctgccagagagatcggtacattgtaaacttgactgtgctgcctgcaagtttcaaatgatgaagtgcctgcacctcatctttatttatttatttatttaatttttttgagacagaatctcgctctgttgcccaggctagaatgcagtggtgccatctcggctcactgcagcctccgcctctctcctgcctcagcctcagctgggattacaggcgtgagccacttcgcccagtccacgtacctcatctttaagatgaggttcccagcttaagcttggctcccagaatcctttgtcattggccttctgcctgtcctgcagcctcctctccatggcgaggcctccacacccactgcacagtctaattatgtcgaatttcttgctgtttcctaggtataccattttttgtcatgatcttggtgccttgaccacatacttgcctggaatacctttcctgctttctcacctggctgactctagctggctgcatgcagttgctcctggtggaggttcctctctgtgcactggcagccgctgtagggtcctgacactccactggtctctctgcctctctctgtcaccttccctgcaactgccagtgttcccagggtgagaatcaaatcctcatgccctcaaaaatagatttctcggccaggcacggtggctcacacttgtaatcccagcactttgggaagctgaggcaggcggatcacttgaggtcaggagtttgagaccagcctggccaacatagtgaaaccccatctctattaaaaatacaaaaattagctgggcgtggtggcgtacatctgtaatcctagctactggggaggctgaggcacgagaattgcttgaacccaggaggctgaggttgcagtgagctgggatcacaccactgcactccagactgggcagcagagcgagactccgtcttaaaaaaaaaaaaaaaagatgtctatgaagagtagagggtcttgcagtgtatgctttcgtttcttgcatcacttcttctctgtcagtgaaattttgttttttgttttttttttactctaatcccatgacataatgaaaattttgacaaaaggttacattggaacatagtcgtttggtcggctgtatttactatttatggttcaaaagaatctgatgcaaatcatgttttgtgagtaaaatagttcagtgaactgaagcttataatccctctagttgcctgaaaagcgtgtcctggtttatgtgtcacttagtgttttgagtggcttttctcctgtagtgatgaatacaaagtatatacaaaatcctatttctttggttctcctacagaacataaatttattttaagtaaaattcttgactctggtggaatggtaatctgactttaagatttctccaaatttaaaacccaagagttattacataattcttgttttcttaataaataagttattccatagcatgaggtaggcctaatcacaaaatgtgtgtgtttcttttctttttcctagtttaatgcttgtgtatgtattaaaaatcaaggcccagaactaaaagctacagggtacatattttaagaagtaaattgatttaagtggtcattggtatgttgcaggatttatggcattaatatttagaaagctcttctccaaacacgtattatcttcatttgaattttctcacacaaagttggtttataatgtaaattcgaagagttccaaatcctaattcttcactgagtcagaatttctggaggtgagtcccgcagtctgtggcttcacaaggcttccaggtgattcttaacgcctgctcaagctggagaacccctggtgtggatttgcatcatttgaatttgtagtacatgggataggaagaaaggagggtggtttctattataactttttttttttttttgagatggggcctcgctgcgttgcccaggctggagtgcagtggcatgatctcggctcactgcagcctccacctcccaggttcaagcgattcttctgcctcagcctcctgagtagctgggattacaggcatgcgccaccatccccggctaatttttgtatttttagtagagacggggtttcaccatgttggtcaggctggtcccaaactcctgacctcgtgatgcgtctgccttggcctcccaaagtattgggattacaggcatgagccaccatgcctggccataacttttatttaaaagtttttcaaacgaatggtttttttcaacaggctgtataaataggctcttattacatcatgttttcatgtgacggatttaacatacactagaaggagactgtttgctttatgtacttctccaaattgctgttcttgagtttatttagtgatgtccacgttatattaacaagcatgtgggctgggcatgagccaccgtgcctggccataacttctatttttgtatttttagtagagatggggtttcaccatattggccagactggtctcgaactcctgacctcatgatccacccaccttggccttccaaagtgctgggattacaggcgtgagccatcgtgcccggcctgtaaccacttttaagtgcagagttcagtggcactaactaaattcacatcgttgtgcagccaccaccaccatccatctccagaactttctcatctccccaaatcgaagctctgtccccatgaaacactcattccccattcttcctttccccagcccctggcagccaccattctttctgtccctataaatttgactactctcggtacctcttatgggtagaatgacacttgaccttttgcgtaacttggtagttacttgaccttttgtgtaactgggttttttcacttagcctaatgtcttcaaggttcacccatgttgtagctttagtttttgggtagtacttgaccttttgtgtaactgggttttttcacttagcctaatgtcttcaaggttcatccatgttgtagcatgtgcagaattcccttcctcttcaggggtgaattgtactcaattgtatatgccacattctgaattgaattgtactcaattgtatctgccacattctgctcatccattgacttaccgatggacgttgggttgtttctaccttttggctgttgtctgtactatacatttttaaagtttcaattacattttatagctttctttcctttttttttttttttttttttttttttttttttgagacagtctcactctgttgcctaggctggagtgcagtggcacgatctcgactcactgcaacctccacctctggggctcaagcaattctcgtgcctcccaagtagctgggattacaaatgtgcaccaccacgcccggctaatttttgtaattttaataaaaacagggtttcaccatgttggccaggctggtctaggacgcctggcttcgtgtgatccacccaactgtagtattttttttgttttgttgtttctgaaataaactttcactctgtcacccaggctggagtgcaggggcacaattttggctcactgcagcctccacctcctgggtcaagcaattctcctgcctcagcctcccaagtagctgggattacaggtgtgagccaccaccacctggctaatttttgcatttttagtagagatgggggttcgccctcttggccaggctggtctcgaacttctgacctcaggcgatgggcctgtctgggcctcccaaagtgctggggttacaggcatgagccaccacacccggcctcttttcttcttcttcttttttttttttttttgagacagagtctcgctctgttgcccaggctggagtgcagtggtgcgatctcagctcactgcaacctctgtctcccaggttcaagcgattcttctctctcagcctcccaagtagctgggactacaggtgcccaccaccaagcctagctaatttttgtatttttagtagggatggggtttcaccatattggccacactggtctcaaactcctgacctcatgatctgcctgcctcggcctcccaaagtgctgggattacaggtgtgaaccaccgctcccggcccttgtcttttatatttgatagattccagatccaaaagacaagttccttgaggaattcaaccaccactattttattccatctgttgaaaatacagctttaatttacagctcatgattgccattgttgttaattttttaacaaagaaagaatagcatgtaaaagctggtgtggaatgatgagctgagtggtgacccacttaaataaaagggtgaactcctgtgctaagggaatggaggtggtagagaagatagagaattctgtagatgaccctaccccctgttaagtgttcaagtcatagtgttactcctgattttcttttctttgttcttcagagtgtgatttaaattttaagtgcttcaaggtctatgaagtacaacctgcacagtagatatttaataaacagtgagtgatcagtattttcctgatggattaaagcactcctattggcagcctactgactctgtggagttattattctggttcatgaaaccagataatatttccatagctcattgcattcctttatgtgggcaaacacatggcatctttaaaagctgacagctgcagttccctagaacaccaaatgcttttctgaagtccacaaatttctcttttacactctggaaagtaaaaccgtactctgccaagtccaggcggatctgaaggggaatatgcacactgctattttgttgttagagagagatttgtactcagtttgctctttattagaccaaaaatttttcagattaggaatggtttttgaatatcatgcatgttttggtttcctttggatgctttcagcatcatgtgattgctttaaacacatgaaaagcaaagagaaataaaacctttcgtagccctgtagacattcttgtttgcctagggcttaagtgattgtggcatgcaaagtatttgacattcaagatttattgacggagaccaggtatcttaagtataaagatttgtatttaaagatgtgtatacctccatttttttctaactagtgtctttataattctctaacagggattggttgtctttgtacttttattttgataatcgaaaaactacatggatgcgttgagatcatctgtatagcatgcttacagctgagcactatcagcacatggttagcttttattttttgtggacaacaaataatactgttttaatggctgaaagtaaatacaaaaagaatagggatgaaattactatgtaagtgatgtgtttgagcgaactatagactggggtgcttactttgcagatggggagctgtacaaataaagatttaaatagagtaaaacgatgggagtagtgagtcatcagacagcttctgtccagtttgaaagaagctgtgcccctcctgttcagttccatattcattttgaaggggaaattggtcttcaacaaattgtcattttccccatgaaatgtatgttgtttacattttataattgtatgagcttttttgttttagaaactagtttgtttgcacctatttaagtaacgttataataaaaataactggccagtcaaggtggctcacgcctataatcccagtcctttgggaggccaaggcaggcagataactgggggtcaggagtttgaggccagtctggccaacatggtgaaaccctgtctgtactaaaaatacaaaaatcagctgggcatggtggcacccacctgtaatcccagctcctggggcggctgaggcgagagaatcacttgagccgcggggatgggggtgggatggaggttgcagtgagctgagattgtgccactgcactccagcctgggcaataaaatgatactctatctcaaaaaaaaagttaattaaaaaataaaaataactggtcaatagactgagttctgcaagggggaaaaagtaactggtcaacattaaaggttcaaggacacgtttctcttttaaaaggagggtttgtacatgactcaggcttcatgaaggatttctttgccatagagattttgctttactttcatgaatccaaatcagctgggtccttaaattggttcttttttttttttttttttttttttaaacaaccagaggttaaggaagggaggggaataaacatccttgtattttcctgtttgtgtttaacatgagtgcctggttggctcaagtactatattttaatttttgtttgtttcccttccctcccctcccctcccctcccttccttccttcctctctttctctctttctttctcttcttttcttctttcttcttcttctttttttttttttaaacaaacccttgtgttgagggctgactttcaatagatcgcagtgagggaggtgctctgctacatacaaatccccgacccagaattctgcaggtcgtctatgaatggtttagagccaggttccccacgaacatgggtggcccaacgggcaagggggcgactgcctttcccaggacgaggggctttctgcaccggaccccagtcctggcgctcggcgggggagggaccggctctctgaggccattggaggccaaccgaggccccacgggcactgctgtatccgtctgcctgggtgggattctgacttaaaggcgttcagtcataatcccacagatggtagcttcgccccattggctccttattgtggctcaagtatttttaaatatgggcaacccttcagtgcaaggaatcaaattagtactgatttgacagccattttaattgaagttgatattgactggtaaggctgagatgagaatggaaaataggaatgacagtgtcttcaatttcttctgggtgtaatttagatctgtgcaaagtaacatgatgtatattttgactgcattattaccacatggtggaaaggttaaaaaaatgtgttgtggaccaggtgcggtggctcacacctgtaatcccagcactttgggaggccgaggcaggtggatcacctgaggtcgggagttcgagagcagcatgaccaacatggagaaacccgtctctactaaaaatacaaaatgaactggcgtggtggtacgtgcctgtaatcgcagctactcgggaggttgaggcaggagaatcgcttgaaccggggaggtggaggtgtcggtgagccgagatggtaccattgcactccagccagggcaacaagagcgaaactctgtctcaaaaaaaaaaaatgtgttgtggattctcatagtcatgttttctttttcatgaaggacattttggagtgctttgtaggtgatgttaagatcctcacctaaaactatatcatgtttttacctttaaaagcttaaaacacttaaagctatttagtttgagaatattggccacgtaccagggagacaggggagttcggtatgccatcggccaataggacacaattctccagcagcttctgcctcctggactcttgttacttcctggaggggattgacgtagctcctgccgctgtgcttggtctggagcttgcagtggcaactgagccccttgagttctgctctcagcgagtatagagtctgtgaaaatcgatgatacgaattggacttaccctgtcacacccaactaaactggagtcgagggaccaggggagaagaaaagctgggacacagagcgtctgccccgggattatcttgaaggccagctgccaaagtgacctgctgtaactttaagaccagtgttaactccttgctgctgaaatgaattactgtgactctaagactggttcagtcagagcttgccagctcccaaaaacttcactagtaccaatgagttttcaaaacagtatgtcacctttctttcttttctttctttttctcctcctcttccctcctctttggttttatactttagctatgaaggccatttaccagagtcaaacttgttgttaacaagcagaatttttaagttcattcagagagtccctcagacttttctgagcctgttcacttgcagagagcagacgctgtcaccatgttcttcgtgtcatgcattcacatggatattcagtcttcatatgctgtcaagtttctttaagatcaaaggagcggctcgcagcggggccacatagatgatgacttttctctttctcataaaacccccagccttccgttttttcttcgcacataccgaagagcacctggtctttctctatgccccaagttgcaattctcttttcccaaatgaaactgttttagggattcagctttatatttttatttgaccttgacaagcccagggtgaagatgatactgcttggcctggagaggagcctgggctcctgggtggcagccagggatcctgccactgaaccgcaatttgcaaaatacttaaagaacatataacaggtctaagaacaacatttagagagtgcttgtgtggcaatatcttgtttattgcccacacttactttgtgggtaggctctttcatcccactttacaactgaggaaacaggttgaaattggttactaagtgattgccctgacctggctgcctcgcctgctgacagcggtgtgggctgacccggtaccgtgcccccgagcaggcagagcgcctgtgcccacctggaggccatcagcccacggcgctcaggcacttggctttcataattcccaacagggccagtttgcagtctttgctttaaaagacctctctgggagtcactctgaaccaattctggtttgagggaggactgcccaatttggtcaattaaactcaattttttgaaaaacctcccaatttccccccacctcttttcccttttgctctgtctggtgtgatccgtctccctgctgggcagtaaccctttttcccagcgctccccctttgttggtggctttccttctgtttgcttggacaggaggcctttgcttccaggttgtccagctgggattcaaatcaaggtccattgacacaagagcccaggctctaatttgctctgccatatgcctccccggtttgtgtcttagtcctagaatgacagtgctggaggagtggagggaaaggacacttggatagctgagttgcagacatgataattgggtgggtgcgggtgagggtggtggtgatgcggagtgggaggaagttgctaggaaagctgagcttaaaatagctgaaggccatagatactggtacagtgtggagtctggcagataattgtgtggcagagaaggcttttgtcctgagaatagtagatgacctcccagaactgtgggaacaacagtctcatgtttacatttattcaggccacaatggagctgagcaattcgcttcctgacatgaattctttctcttccaagtagatcgtgtttccttattctgtggaaaacgttaatgccattagaagccagattgagggctacctgtaaccggaaacctctgcagagaacatcctgttactcagtacccctttttcttcatttattttatgaaagttccctttccacttgactgatatttatcttcagggccatattttctccttctgtcaaccgaatatagtatacgtagctaatcaatgaattagataactaaatccatatatttcctcttcttctgtgaaccccgaatatctgagacaggtcttagttaatttagaaagtttattttgccaggattgaggacgtgcctgtgacacagcctcaggaggtgctgacaacatgtgctcaaggtggtcagggcacagcttggttttacttattgtagggagacaggagacatcagtcagtatatgtaagatgtacattggtgctgtccagaaaggcgggacaactcgaagcagggagggggtctccaggtcgcaggtgggtgagagaggcagccagaagcatttttctcagtgagtagaggggtgactttgagtggaatgggaggcagatttgcctcccagtttgacttttccttttagctgagtgattttggggccccaagattgattttcctttcacaatttatatgataaggggagtgttttattcccagtgcctgaactgaagtatgatcattttttttgccattatcttcctttggccttttcttttctctgtagaaggcaggagacctaatatgctcctatttatacctagttcctttttttagtcggctaattatttacttaaaataactggttcctagcaaagtctcatgagatttacatcttgtaattttagggtcatgagtgagataattattttagtttggtgaacacatggattttatttggtgcatttccaaagtttagtagaaaagataaatgtcaaatgaaaatgtttagtgttttaaactgtttgcattcagaaggtccccctcctcatcttgtgcatagctcagctggttcctggactgtgggcctgacagcggctttacttcattgccaatagtgtcttcctccttgagaggttcatgtgttgcacagaacagtagccacacttattgagtattgtacttattctttgtttttgagatgagatcttgctatgttgcccaggctgctgtcgaactcctgggctcaagtgatcctcccaccttggcctctcaaattgctgggattacaggcctgagccatcatgcttggccccctacttattctgtgtcagggcctgccaaacattttatgttttcttatttaatctttcaacaatgctgcaagttgaagatgatgaagaaattgaagcttaatgaaattaaatagcctccccaaggaccacttttaatggtggaactgggatttgaagccagatctgcctcttctaaagcctgtgctctgaaatagaatggtaactggagtggggcagacctgggttcatatcctgggttcaaattctctcagcctctgttttctcattttaaaatgggagaaacacttatgtcatggaaagatgagacctattaagggccgggtgcagtggcttatggctgtaatcccagcactttgggaggctgaggcaggtggatcacttgaggtcaggagttcaagaccagccttgccaacatggtaaacacctgtctctactaaaaataaaaaattagccaggctgggtggcgcacacctgtagtcccagctacttcagaggctgaggcaggagaatggcttgaacctgggaggtggaggttgcagtgagtgaagatcgtgccattgcactccagcctgggtgacagagcaagactcagtctcaaaaacaaaaaacaagaaaaaaacaaaaataaataaagattgtacctattaaatgcagtaatctttgggaagctgattagggtgcatgcgtactaggctctccatatatacatgttggtttgatcatccctctgatgtgtttctccccagatgaaagctcttcatgggtaggacccttgtcttgtgttcatgtgtcctcagccctgtgcctgttggagaagggagtgaatgttgaataagtaatgttagaaatttttctaggttcttaaaagaagcttgtttgtctttctgttttcttttctttttcctttttttttttttttttttgagacagtttcccaggccagagggcagtggtgtgattactgcagtctccacctcccaattcattgttgaagcaattctcctgcctcagccacctgagtagctgggattacaagcacgcagtactacacccagctaatttttgtatttttagcagagaaagggttttgccatgttggccaggctggtctcaaactcttggcctcaagtgatccacccaccttggcctctcgaaatgctagaattacagacatgagccactgcgcctggccagttttcttataccatgagcacaataggtttttacctttggccaatgggttacttgattgcttttgtttctttttttcatgtttaatggagtttattttttagagcaattacaggtttatagaaaattgagcagctagtacagagaattaccatataccttctccttccaccttacaaatttccctattattaacatcttgtgtgatactgatgcaggattttttgcttagctcagctaggtctgggttcttgtctcatgaccaggaggaagtagacacacggacactcaaagagtgagcaaggcgggaagttttattgagtgatgaagcagtttttagtggggagggtacacagggttactccctctacccaaaggcaagagagttctttgtgttgggaacaagtaagcggtgctgaagagaaaaaccagtattgagacaaattatttctcagcaaggcaatttacttctgcagaaaggtgctgcctgttacaaccgcaagagtacaccgagcaaaggagggaaggggtttttatccctaatgcagttcctgtccctgtgtccttcccctgttggctagggttggaccatacaatctaaactgatgccagttggctaagacttaaactttttctaataggtaaatgcgtgatttgtaagagaaggagggggtaggagtggtctgtccattacggtacggggcatgtcgggccacaagcgtgggagggttgttcggaggctagaaacaagggagtataaggaggttgggcttctgaacaaagagcaagaacgttacacagttaaaccctttgaagaggaattcatcatctctggcaatttccccctttgtcttttgataattcttcctcttcacatttttttaacatgatttggctctgctgttcttctcgatcacctaggaacaagagcctatttgagtatagaggaggagaggtaggggaggttttgtgagagctgtttctataagtccttgcattaacccatggatacagggtatgatgcagcatcctacatatgagtacacctgtaacaattgcaagagaggttaatattgaagtcataatccctttccattcaccaaaccacttttccatgagacttgtgatggggtcatttattctggaatttttggctaacttatctgatatggaggtaaggccttgtaaagccttcataattgttccattgggagctgtgttgttagggctgaaagtacagcattggactctggtcttgacacagactttgcctttttttgctaacattatgttaagggctcttctattttcccagggcatttggctggtgggcctaattgttcagctatccctttaatggcatcgtctgcataattgacaaaccgctgttgattatagtaaatgtaatttatccagtctacatttttgtttatagttgaccaccagaacagtgcagatttgaatctgaatcctgcagctatttggtttcggggtttaaatttatctggtacctcttgtgggaccccagtagcagctacataaatgtgagggtcaaaagacccgtgaggagcatcttttttttttttttttttttttttttttttgtgatcctctgtcctgttatgttgacggaatgccagagtgaaagggccagttggactagggctcacgtgccgctccagtttctcagcagagtgcctaatagtttaccgcagtaccaccatacatttgcttgagaatagacaaaaggcagcttgactggtaagctcttgggaaggcttggtttgactacaccctgttaggtctccgagggacgttaatctttccccttgccatgagagaagacacgaggtaaaattaaatcagaagctggaggccagatggccctcgggggctgacctgcggggtctttaacttgggggaatagcaatgagagagtcttgcatgctctctcccaggctgtgagattttgaaagagacttaccatgcagcttatgcccggtcagtcagaagaccatccaagtgggaaggggactatctgggcctctggcctgcctgccgcacaagcctaacagtcaattttgtttaatgtgcgagcagaatatttaatccattccagccaggcattcgcatcttggtatcctgttctaagcactaaagtttgttttaaatctttaacctttacagtgcctactatagtttcgtcatggggtatggaaagaacagctgtttgattggaagagggtttagaaggagaagaaggtgaagggggttgaggagtaatgaagtgcatttcaaaggatcctttggggtcctttccaggaatattagctcctgggccatagaagtgacctagggtaggcttggtgtcggtagaggtggggacattaatagagatttgcacagggttacactgttggagttgacaggtggagggggttgtacctttggtaaagtgaatgtaaggctttagataggtacaacctattgaggaggtccagccttgacacttggtggtatagattacatctccctaagtatcacagaactaccagttataggatcggcctcagtccatgcaaaagtcagttctgtaggcagttttatttatcctggaagggcaaaggtacttttctgaagaggccagctgtctttggctttggagatccccacagggcataacaagacaagcattaaaagtaatggtttgaggggagctagatctggttatattaataataagatgtgtggtagctggggaaaggaagctaagaaggaagagacagattaaactttcttttttaacgtgactctggttggggtgggtcctggaacggcagtccatgactctggagaggatggtgctcttttgacttgggtgtgatgagtgcaaccgtttttggtggtcctgactgccgtttcagtttttagaagtactaaataaggttcttcccaagtaggtttgagcttttcttctttccaacttctgacgaggacgtaatctctgggctggtgatgatggcctgcaaattcaaggggtgcagtttgtgctaaaaggccttgagtcctaagagaggaaagggtggaagacagacctgatacatagtttttgagaaattcatcctttgtttcaaaagtgggaatgtcagtattagagtttaagtaaggcagtccataaagcatttcataaggagagaggccagtgtccttttgcggggctgtttggactctgaacagggcaataggaaggcattttgtccgaggtagctgggtttttaaaattagttgggttaaatgattttttaaagtttggttcattctttctacttttcctgatgagggtggatgccttggtgtatgatattcccattttattcctagtgcttgagtgagccctttaataacgagggcagtgaattgggttctattgtctgaatcagtgttttctataattccaaacctaggtataatttgttttaataaggttttaactacatgtttagctgttgtgtttgggaaagggatggcctctacccagtgggtgagatgatctactattattaataaatagttaacatggcctactgggggcatttcagtgtaatgaatttgaattttttggaatggcgttaaccctgagttttttcccccaagggcttgcatcttatttgttgatttattagttttttttgcatattatacaactatccacaatttacctagcaagggtatagatttctatacacccataaactccgagagcggcatcacacatagcctggggaccccagtgagttccttgatggagttgagacaacatccctcttatgagaggtttaggcaacatttccctctcatctggtaatattcgtttttcttctgagctttctttggctcctatttcatttaacttttcttgtttgttatgggaaaagacggggactgtggctgggggagggagacaaggagttaaatggaaaatgggttcccgttggggaagaggcagcttgcttggctatttggtcagcaagattattccctcagcttctaaaggaaagatttctttgatacctgggacgtgaacaacagctatttgttctggcaactatagattttctaatacttgaattattatgtccctgtggactaagttactgttaatgaggccttgctctgttcaaatttttccaaggtgtggaccactccaaaagcatacttggagtctgtataaatagttccttcctggttttgcagaaattttaaggcttgatttaatgcaaacagctcacatgtttgcgcagagcaggtgcagacccgttattaggtaatcttcccgattttatttctgtgaggatatctccgtttactactgagtacccgttatgccttttttcttttattacttgcctcgatttccttcttttgaccatacatctggatggatgtatcctttatctagggtagtgagcaaatttagggaggggaggaatttttcttggttaacatagaggtctgggtttaattttagcattaaatctcttcctaaataggtttgttcctgcctccgggattaacagaagtttaatatttactgagcggtccttatatttaatttctgtttcttctaagatttttgctttaaacccctcttcttttactcccgaaataaaaagtttttcctgtgaacaagttacaccagggggaagataacaaactgaggagcgagcagctcctgaatcaatgaaaaaggtgataagctcaggtttgggtcccacctctaaatttatcaagggctcttggtgggacttgaggtaaaaaaaagagtggagcccttgaccgccgtattcttcctccaaggtcatgagtagaatgacttctttctctttttcccatctgggacattcctttttaaagtggcctatttttccacacttgaagcatttgttttgcccttttccctctctacttttgggttctttggctgtgctgttttatagcctttatatggcctggaaagtgggggcttaagttctttataggttttggcccctgagtgttctgttgtggggcggacagcatgatccttgctttttgtttttgcttttcttttcctcgtcttttcgtacatataccttttgagcgtctctcaaaagctgctctatagatttatctttccagttctctattttctataacgtgttttgtgatgtctggccaactattggtaacaaaatggagctttaacatcccctgcccaagagggtcttctaaacctagacctgcatatatcctcgcttgctccttgagcctttctaagaactctgtaggtccttcatccttcccttgttgtatatagaaagctttgggaatgttttggatgcggaatacagatttttgagttcctttaattatcagttctccaaggtcttgcatattcctccagtaggctgcgttgttactatcccattgaggatctgtggccgcaagtttttgctcagctgctgggacgttctgacctgggggatgctcacgttcccaaattgtcatagcagccctgcgaatcatgctcctgtcttctcctaaaaagcgaatacctaggatagacattagctcagcccaagtatatatctggggtctgagaaattgattaatctggtcagccactatataagggtcacttaagagtggtttgagctccctttgtaggtttcggacctctgagctagttaatggagcatttagcctcctctgaggggcacttcccttaaggggaagagagttggagctaactctttagaagtggtggggaaagggaagttttgaatatcctttttacattgttctgtctcgcaccgaagtcttcctgggggagggccctgaggctgggaatgattccaggagttaggattataaagagggggcacaacgtgagtcgggggaagggtccagggcggctgcctgagggggagggaggtgagaggtatctggctgaggcagatggtctaaaggatcccatgtgggttgcttaggggtgggggccttagtttctatagggtaagtagtttctggcttattcttactggctttgagggggtagaggtggacaggcccctgccgtcagcacagggcatagcgtatctcctcctgagggacaggactcttgttattcacatactctattaaaagttgacaaatccaatcctcatttgacccaaactgtagccagaaaactgatggtttgaggatagtttccttagtccaaataaaacaacagtattttatcatttgttgctttttcttatttttagtcctttcattatctttccagtattttagcaggagacctaaggggctgtcccgggaaattctattgtcttgcttggggtatttcgcatcctggagaaggtgtttttttgagtttgtgaggctcaacctctcttactagagatttcttgcaccctttctttttttctttttttttttttaaggtggagtcttgctctgttgcccaggcaggagtgcaatggcacgatctccgctcactgcagcctctgcctcctgggttcaagcgattcttctgcctcagcctcccaagtagctgggactacaggcacacaccaccacacctggctaattttttgtattttatttatttatttatttccttggtagagatggggttgcaccatgttggccaggctggtcttgaactcctgaccttgtgatctgcctacctcagcctcccaaagtgctgggattacaggcatgagccactgcgcctggcctcttgcactctttctttagaggcccaaccccccttacttgagatttcttgcattcttttgcttctgcttaatccttctctggctgcttcctttgtgggaattttcaggtcccccttagcgttggtgggtcggtatgatcccccgacaggcaagacaggcaagctgtcctaagctgtatgaggtgaccacggaaccacagatccggactccacactcaattgtgcgtctcattcacacactttcaacctccaggatgtcctgaccaccaaggaaatactgcactgccattgtgttttttcttaacctttgtctctgcacagagttacctggtcactgtggtatttgtaggcctttttctcccgcgttgctaagcgtccgggtttattcgtcacaccaggtgggtctcgatccctaacccttgaggccaccacaacgaggcagtgggacctgtctcctcacgagtgaggactggagacccttccccagaggagaatgggaatcctggatgggcccccagattgttgggaacaagtaagctgtgctcaagagaaaaactagcactgagacaaaggatttctcagcaaggcaatttacttttgcagaagggtgccgcctgcatctgttacgactgcaagagcacactgaacaaaggagggaaggggtttttatccctaacgcagttcctgtcggtgtccttcccctgttggctaggattggactgtacaatctaaactgatcccagttggctaagacttaaaacttttttgaataggataaacgcatgatttgtaagagaaagaggggataggagcagtctgtctgttacagtacaaggtatgtctggacttgtgtgagcatgtcagggcacaacaagagcaggagggttgtttgcaggccagaaacaagagagtataaggaggttgggcttctgaacaaagaacaaggacgttacacagttaaaccctttgaagaggaattcatcatctctggcgctagtattgttgcaggattcaggaggacgagagagagatctcgggttaaaacaggagaatcttttattgagtgcactcaggcccagcagattcacacccaaaggttgggctcagaacaaagacagcacttgacttttatacacacttcacagaagggggtgggctagctaaagcaagcttatagtggcgtgaaagcagggatacagaggtgggacaaagacagttaattaaatcgttacaggttcataactcaggattgcacataactgttgctatgcaacccagatgtccgttatctgtgtttgcctaggcatggacttatcctataaccttcactgtggtgcccgggcagctgtagttccggcctactcaggcttttcatgaccttcattgtatttcttagataaaacaatacttgaagtcactagttacagagaacaggaatctataaactcattctataaaacaaagaaaaatttgttttttcttctccctgtgttgagggagtgctgggaaagtctccagagcacattagataatattatcaagacttttcctgggtctcggctgtgcctgttgctgcctctgggacaaatcagcctaatacaggaaaacttatttctctttcttttaaattttatttttctttaatttccggcctccgtgtagctgagcccagggctttttatgggctcagaatagggagtgtgtgctgattggtttgtgagtatgcaaaaaaggttaaagtgaagacaccactcaaaggtgggcatgatagtgtagaaaaccaattaggagactggacatggtggctcatgcctgtaatcccagcactttgggaggccagggtaggtggatcacctgaggtcaggagtttgagaccagcctgaccaacatggtgaaaccctgtctctactaaaaaggcaaaaattagctgagcgtggtgctgcacacctgtaatcccagctactcaggaggctgaggcaggagaatcactcaaacccagcaggcagaggttgcagcgagccgagatcatgctattacactccagcttgggcaataagagcgaaactcagtcttgaaaaaaaaaaagtaaaccaattaggaaaggataggtatatgtaaaataggtgaaagacggatcaatcagaggaaactgtgccaaatgagaaggtgggttctcagtcccgtgtgaggatttacccaggactctctccagattgaaggttggatttcactggggacctgctcctgtctgcctaggcatttgtctgcctcctgcctctatcagtatgtttgttaaaattgatgaactaatattgacaacattattttttccccactggatgtctcttacacaataattatggttttttgtttgttcgtttgtttttgagacagagtctcgctctgttgtccaggctggagtgcaatggcagagtcttggctcactgcatcctccacctcccaggttcaagtgattctcctgcctcagccttctgagtagctgggattacaggtgcctaccaccatgcccggctagttgttgtatttttagtagagacggggtgtctccatgttgttcagagtgttcttgaactcccaacctcaggtgatccgcccaccttgacctcccaaagtgctgggattacaggcgtgagcccctgcacctggccaattatgttatttttaactagaatctgtagtttaggttcactctgtgttgtacatgtctttggattttgacgatgcaactttacacatccttagaaatccttctgattaagaatgaagcaaagacattttttcttcaacttaagtttattattttttcaaatggttactaagttattaggacataaatgctttttaaattgtttggacatagtaacttaataaatcatcaatttttttggtcttgaggcaccatgaaagttactgagacatcaaggaacacatgtgacagtgctgaaggacaaatgtacccagatgagctggtcaggaatgtctgagatgattatgttcaggacagtgagcaaatttaaaacatagagcccccgggctgatgtctgagatgtccgtattgagatcgttcagaaatgtaacagacagtagaataatgatgggccttatttttctaatttaaatttaaatgcaaaagatacaattgatcaggcatactagattatactttgaatttcatttgaaagctcagtaactctatgtcagcctattaaatagtgttaacaaaagtttccaggtagtcttggctggaaattcttgaagaagaatacattaaaagtactttaagagaaaatattccagaagaccttgttaaaccagttttagctatggttagttgcatgtatgttagtttcagcaaggagagagggaatagtgtttgtctttaactagaacaatctgaaactgaccccctcttaaaacattatatctaatgctagatctgaatagtagtcttgctttagccaaatgtagacatgctagtgttttagcagatgattatttttcttttgagcataattttttgtttttattcttgttttgtgcttatagcagtggttcaaaacttagaagctgtaatcctctgctggatactgtgaaataactgacatatacctagttcttttgtatggaccaggaacaattttgacaggacacatggctgtcctatgaagagtataaaatcatagccactgtcattgggggacagagttgggggtgtcacagagctgtcaaattaggtttggtgggtaatgccctagttctttgctaagatttgcttgcctgcccctttgtactcgtggctttttccctttcttcccctccccccccccttttttttttgagtgcagtgttcatgcactagcacttgtttctaggacccaaaggtttagggaaatttatggcagaaaatcttaaagcggatggagctgtatttagtagcagcttctcttgctcttgaggaggagaccgtcgtcagtaattttggttcatagcactcccatcccacctgccactcagagctgcaagaacacggccttccagaatagagtcaaacacagtgtgggtgtcactaacttgagttattttaagaggtcaggaaacaaacctactactgtgtgttttttgacattattttaaaatataatgtggataaatcagatgagtgacctctctgtggaattaaaactttttacgtgtgaagtttttaattttgtgggtaattttttcaaggtcctttagaattgtgtcactgttgcctgctaataaagtcatgtgaaggtctctgttaaagcagtggtccccagcctttttggcaccagtgactggttttgtggaagacagttgttccacggattgtggggtgaagggggatggtttcgggacgaaactcttccacctcagatcatcaggcattggattctcttacggagcatgcagcttacagagcgtgcagcctcaatcccttgtgtgtgcagttcacaatagggctctcactcctgtgagagtctgatgctgccactgatgtgacaggaggtggagctcaggcagtaatgctggcacgccggcagcgtggccacgttctcagcagcgcacggaccggtaggagctggggactctctgtgtgttaaacgaaggtagtccaggtgaagttcagcataggctggagggtggaacacacagatggtcgctggatgtagtgacctttccttgtcacaggcttaacaccccaggtggcacggataccttgaagagccatgctgtttcctaagagaaaacgtggaatttggaagagattttgaagtttctttctcctgtcctctagcaagaatatatatcatgtctggaactcttggagcaaaggagtgggtgtacgaatggaagaagctccgatgggttgatgcagaatatctcacagccctcccggtgttggcccattccctgtctgttgtgtggtatgatgtgtgttgaaatggctccttgatcaaaagtaaacatagctgctttataccattgcgtggtaaactgtgaaggcaggcattgagagaggggtggtaaaaagaacctattcctggtcaaaaatgctaaaatacttggaagtgcaaatgttttggtgcgtggcatgtgagcaacatgtttactgtctgttctttcagctataattaatgccttccacgatactcatcataatcataccttaatgagaaggccctagaaaagaaacccaaccttttttgttgggttacttcgcatctatcatgatactttttcctttgattttatagcactttaggatgaacttacttttccgtgctaaatgttagctttggagaaagtgtatcatcagaaccatggagtttgaggtcttctaagatgaagttcataatttaagctttatatgtgtttgatctcagaaatgtcttggattatgtcaaatttttactttttttctttttttttgagatggagtctcactctgtcgcccaggctggagtgcagtggcgcgatctcggctcactgcaagctccacctcccaggttcatgccattctcctgcctcagcttcccgagtagctgggactacaggcgcccgccaccacgcccggctaatttttttttgtatttttagtagagacggggtttcactgtgttagccgggatggtcttgatctcttgaccttgtgacccgcccgcctcagcctcccaaagtgctgggattacaggcatgagccgccgcgcctggcctacgtatttgtttttaggtttttattttgttttgttttgttttgttttattttgatgttatgttttgttttgttatgttatgttatgttatgttatgttatgttatgttatgttatgttatgttactttatgatgttatttttttgagagggattctcacacagtcacccaggctggagtgcagtggcgtgatcttggttcactgcaacccctgcctcctggtttcaagcgattctcctgcctcaacctctcgagtagctgggactacaggcacctgccaccatgcccagctgatttttctgtttttagtagagacgttggccaggctggtctcttaactcctgacctcaggtgatctgcccgccttggcctcccaaagtgctgggattataggagtgagccactgcacccggcttgtttttaattttagtattgtcattgtattttcttgtttttgtttgagataaggtctggctctttcaccccgttgggagtgcagtggcgtgatcatggctcactgtagcctccatctcctaggctcccgcgatcctcccacctcagccttattttctggtttgatctaagcgcagattaccagtctgctgttgtgacttgatgcgtttatctcactgaagactggtacccgaggcagctgactttggttgaggtgtggcacttctttccctagttaatgtgcatgccatgtaccattgtgagtttgccagaagcggcctttgatcctagctgtggttgctctgggctgtcagtatttggacaagtggacgggtatgccgtaactgctgggatcctgacttttctttgaaagggctcaagtttttatgaattttagtttttataaataccttattaggtatgaacacatattcacaaatagcatgcaatttgaaacctcggtttaccagtgaactaaacagaagttgtttctcttggtagccttctgatgaggaaacgaggtggggtacaggagcctacagaggactgaattgtgattacaagtagtcttcctgtgtccttgtcactcttacggtctagaagtagcttcgatgtttatttgcttggagtttcagcagcagaccgcggtgcttgaagctgttcatggaatgaccgcttgtgtctgagccagcgtctgaggaaactgatgttctataagtaggtctgagaggcttctctggagttggcccatgtcttgctccctcttgctgatgctctccctgccaggaatgttcttctctctctgggtttctctttagagccctctgcagacatcaccaccccagcaaagccctctgtaaccatccaacctgaagtggtttccccctgaatagcttaagcagatttctttttgttaatacagtccagttggtattaatcaccttctttctcagtcttcttttctattgctgtatatagttatacatttgtttttgtttttgagacagagtttcgctcttgttgtgcaggctggagtgcaatggcacaatctcagctcactgcatcctccgcctcccggattcaagtgattctccagccttgcctcctgagtagttgggattacagtcatgcaccaccatgcccagctaattttgtatttttagtagagatggggtctcaccatgttggccaggctggtctcaaactcctaacctcgggtgaggtagtctacccacctcagcctcccaaagtgctggggttacaggcgtgagccaccccacccagctagttatgagtttttctgtcttgcctctctaaataagccatgttcctgtgccttccacttgtatattccttagaatttttagtatagggcctgcatgtggtaggccctctgtaaagagctgttactttgatagtgtgtgaattatagaattagaactctgagggactttggtcagtttgccacgttttctttctttttttttttaatgcagcctacaaagttggacacattttcttgatatgttgaatacttgtttctttgagcactggcagcttgtagagagactgaggccgtagttagttgtcttacttactggttctttccagggtaaaaccagatctgtgtataaatgagtttgagggtcgtgtctgatgctgtagaatatcccagtggttgcatggaaaacagctggcttggtgtgttggctaaactgggtatgaacatagctcatgttaaaggtaggctctttaggttgagtttgttttgaatgggtttttctggtggagtgcagcattcagctcattaattttcaagttgaaatgtcgtcacaaaaatatggctttctttagcacagtactagcttttaatatgtcaaaattgcattcaaaggttggttaaaagctgaaagtgctgttgccagccttccaaattgcaggctcagaaatcccttttgaaagaggaagagtgggtgtaggaaggtgggaggaagcagttacccgggaggagcttcctctcagggtcaggttgatgaggccctagttttgtttttattactgaaacaattgctgtgtaaaaatgagtgagcaaatgattacagtagttatttgtcttacagaaataatttttcctttaaaaaggatacatcaaagaacctttctccctctctgaggaacttacttctgggagagttcatttcgtccagcctttcttgactgtgtgtttggtaaatgttgggcgtgattaggaaatggctggatgacactgtggatacctggaaattgctgctgctcttccggcgcagtgatttgaacctgggagagttgaaaaaggggttcttcccacattcttttagtgcagagataaaacgtgaaggcctgctgatgtgggctctgtggctcaaacggggttttaaaaatagagaagctttccagaaaagtccaggttgctggctttgcttgaaaagcataagctccccaggccgctgctcctcctagccccaaggagctggagccagtgctgaggccccaggagaaggccccgtcccgctgtgctgcgcaccaggcctgccaccacctcgaccagagcttcgggcagacctaaaatttgtacacgttttcacatctaaaacgtggcagtgttgtatttaatgagttattgcaaaagacaataaaaactgtaggttgatttcttggtttgtaccaatctgtgtagcctctgactctgtcataaaagcaggttttattttacatgtggactttctcccctaaagctacctttttcaaactattaatggctttccaaactttttattatgagtaatgctcattttttaaaaagttggtagaaaagtactgtgaacacctgtatgcatgtccgctaggtaaattagcacatttgctttctctgtctctttcacaaacacatgtgcacatacattttgtagaaacatttgaaagtaagttgctttatgtcatgacactttacccctacatactaaaacatgtattgcctaagaatagatattcttctgtctagctgtgattattatcacaggcaaagaatcgtgcacctgtggtcccagctacttgggaggctgaagtgggagtatcgcttgagccaggaggcggaggatgcagtgagccaagactgtgccactgcactccagcctgggtgaccagagtgagaccctgtctcagaaaaatacaaataaaaaataaaaaagtgttattcaatatgaaacgcatggttgcatttccttggttgttccccagatgtttcgatagctatttttattccaatccaagagctaatgcagcattgcatttggttgttctctctttagatgcctttattctagacagttccttgctgcttctgtttatctttcaagactctgacattttttttttcgtttaagcgtctagggtggttgtgtagactgttccataatttgggtttgtctgatgatttcctcccgagtagctgggattataggcatgcgccaccacgcccggctaatttttgtatttttagtagaaacatagtttcaccatgttggccaggcgggtctcgaactcctgacctcaggtgattcgcttgccttgacctcccaaagtgctgggattacaggggtgagccaccatgcccggccttatttccccatgattagctaagggtcagccatctttgtcctgagggccgcagaagcctgtggtgtttgtgtctgcttccgctgcatcacgccaggctctgtggctgtcctgttgctggggctcagttcagtcatttggtgaaggtggtgcccatgagatctttccattgtaaaggtacccacctttgttcctttgttaaatttatctgtaacctgcaggatgataatttgaggccctgtctcttctgaatgccttacgttagcattcattgatgatccttgtctgaatcagttattgtgcattggtggctagaaaatggtgatttcctaattggcaatccttctgtgttgattagattttttttttcctgaaaaattttctcccctgttgagtatcactatgtggtttataatgctttgccacccttttttctttctggtgttcaaattatcccagacttggtgagtggagccccttcaggctggttcctctgtcccttgggcatatgcccatctgagcactcccttgcctcctggtgagaaacgtttctgcctcgccttgaccttcccttgctccagacttgtaatcaaccgcacggattcctttgtaatagggactggtatttggaaatcaagatctggttgccaggtttgctcatcatgaactgagatgtcattgcttttcaccccttccaatggaaagagctaggagctagtacatagattgatgtttttaatcaaattagaatgcttctgtttttcagggcctgcttacatactttgtagaaactcgcgtggcttgtagctcatgctgaaaaactcaggttctggtacctaagccatcccagagatgaaagttacatctactttttgcagtcttttcatttccagaaccctccacagttagaattgtgtatgctgacagtatgcagaatctactgaccttaacatatctctgaaagacgggtcagggtaagagagtgcagaaacaaaaggcaggacttatctttttattgagtaagattgtattgtatgcttcaaaacatgttttttggacaaggactttgttttaggcattgaagtcctcgttctcctgaggataaaaagtctctgccctgcagcctagcagtgcatttggtggcagagtgacaggcttggaagagaatgtggagggagtaagggaggcgcttgctaactgcccctgacgctgacagagctctggagaggtcagtgcagcttctgagttagctgctccttagcctggataccttaaatgccatctggttgggcatgccaaggtaaagtgaacgtctgtgcaaatatgagtctacgtggatggagaattttacagggaagggaacgtttttagtgtggttgaaattcaaggtgaggctgcgtgggtgacaccttatgctgaccactcttgtttcaggaattggaaggatggtgtgtgtattttgaaaatggcctagttctagctaaggctacctcttagtaagtgcttactctgccctatatgtcacttaaaaagattcattttgtttgaaacctttgtaagtctcaatttcttggtacgtcacagtactggaatgtacaaagccagttttttttgtttttgtttttttaattagagtgcagtggaagtcagtttagatggttttcagtgtccgtatagaacaaatggtagccaacctgttttcctaggaattgttcgtgttcggtacttaataaattcttagggctttgaatgggacttatctgtggtgggatctgagcaggtgattaaactgcttaagtgttgtttacataaagtgtatgaagagacagatactgagtgatttttcaagattctggcagtaatgggattcagaacatgtttgagtagaagaggggagcagataaatataaagaatatatttttaacttccaaagtaagaacatttaagaagcaaatataattggctaccacatgtgggttttgcatcctttccagaccatcctgcgcatgagtctcttattaattttctgaaaatgtgactctggccacctgttcgtgctccctccatcccagctcctggagaggaaggccagggccttctgtctgcacccggcaaggcatggtctatgccacatcgtcatgcaccacagtgacccctggcctcacctctcaccacttccctcccctgggggctgtgggtcctgccgccacctgaggttgccttgcagtcgcactcctgagttctttcctggaaacgctctccgcctcgctggctgtgaacagaccctggcacgctttgaggcccagcctgcatgcctcctctctctcaaaggctttccccacgctgcctctccacgcagagcgtgttctcccccttctgcctcctggcacctgcttatccttctgaccctcatggatgtcattgactcccttccctccctcctgtactgactaccatggtcccttgtgcgtaggcagctggagtgtagcatgtgcttttcacatcgatttaaccttgtaacgttgtggagagaaagtgagatacaggcaagaaaactgagggtgactttgaaggaattgtagtaaaaacccaggcggaggaattcctgtgattctctagtccttctgggatcttgatggcagtatttgtgatctgtgtattacttctgttcagaagggcagtcctgttgaaggtaaacatcagggaattgctgccagaaagggagtgtttttagtataataatggtctgaagctacttgtaccttgtcagaagtaaaatcaaagccatttgtgccattttcattaatatttttaacaccaaaggtttcttccttaactctgtttttggttgtgattaatttaagatgggaattcacagttctaacctcgcctcatttttagtacaggttgagcatctcaaatttggaagttcaaagtctgaaatgctccagatcaaaaactttttgagcactgatatgatgctcaaaggaaatgctcattggagcattttggatttcagatctgtggatttgagatgctcaaccagtaagtataatagagctattcccaagatccgaaaaaattctgaaatcagaagcacttctggtcccaggcattttggagaagggatgctcaacccatacaaccttacagaggggtgacatctatcagtcaagcaagagtcatcctgcagtaccttcctttataatggggccgaccacaggggcaggcactgggtttcctttttcaggttccttcttacagcctagattcttactaccctatgccccccccccacaccccttttttctgagacggagtctctctctgccgcccagtttggagtgtggtggcaccattttggcacactgcggcctctgcctcccaggttctagtgattttcccacctcagcctcccaagtagctgggattacaggtgtatgccaccgtgcccagctaatttttgtatttttggtagaaatggggtttcgacatgttggtcaggatggtctcaaactcctggcatcaaatgatctgcctgccttggcctccctaagtgctgggattacagacgtgagccactgcacccggccttattcttattaccctatatcctatgacttccagttcacatgcaccatgggctactggaattttttttttttttttttggagacagggtcttactcttactctgttacccaggctggagtgcagtggtgcaatcacaggtcactgcagcctgcacctcctgggctcaggtggtcctcccatgtcagcctcctgagtagctagaactacaggcatgtaccaccacacctggctaatttttatattttttgtagagatggggttatgctatgttgcctaggctggtctcaaactcctgggctcaagtgatctgcacgcctgggcctctggatcgcttaggttttaatatgaattctgcaacatctttagtttggtaatctttgtggattgctacagagtaaattaaattatttacaaagaataatattgaataatttaattattcacaaggaataatcttgaaagatctcatgtgttctttactcatcttcccccagtgataacgtcttgcagaactgtgtgcaccagcacagtcaggatgctgccgtgcgcatagtcgagacgcagagtgcttcccaggcatctctctcatggcccttttacagccacacctgcttcgctcctgtccccaccccttccttagccccggcaaccactcttctgttttcggtttctctagttttgtcttttcaagagtgttatggacagggaatcataccgtatgtaactgctgaggcttttttttttttttagcttagcataattctcccacgattcatccagttcctcacctggatcaatagttcattctttttttttgctgagtagtgttccgtggtgtggctgcagcgcagtccatttagcctcactcaggaaggacatctcggagttgtttccagtttctattatgagtaacgctgctatgaatgtttgtatatggggttttgtgcgaacataagctctcattgctctgggataaatgcccaggagtgcatttgttgggttgtataccgttgcatgtttaggttttaagaagatacctgttttctggagtggttgcaccattttacattcctgccaatgatgtggaagggattcagttcttccacatcccaaccagcactgtgttttattttagccattctgatagttgtatagtgatactcctttgtgattttaatttgcatttccctaatggcccttttctctaatgaacatctctcgtgtgcttatttgccatctgtgtgtcctctcaggtgagatatcacttcctgtctcttgcacattttctaattggactttttaaaactcttgagttgttttttttttttaatcatggtaaaagcacatgaaatttaccatcttaaccatttttaaatttcaattgtgtgtcaaaagacaaaattacaaaaaaatttagtgtatggatcttaattggcttttttgattccagaatcaggcaacacctcattctataaaacagaattctgtgaaatagaatgagtgttctcatgagctgagcaggggaagctggctttgtagacagaaaaggggtgagggaaacagacacagagaacagagagcagatgggtggtttcagagtgacttcccttgtaaaggttaacgcagaggggacttccttaccacgctggcccaaactggcccatttgggggatttgctgttctctttctcctgacttcttgcaaagtcagataaacaacttacttttggcttggtggtatggaggttaccaagagggactccattttggtttggtctgctgggcctggtgcaggagctcagtccaaaccagtgttctcctggctcactgtatttatgttgagttttaagaattttttatgtattctaggcactagtcctttgtcagatacatggtttgtaaatccctcctcccattttgtagtttgttttttcattctcttaacaggggttttgttttgttttgttttgagatggaatctcactctgtcgcccaggctggagtgcagtggcgcgatctcggctcactgcaagctccgctttctgggttcacgccattctcctgcctcagcctcctgagtagctggaactacaggcgcccgccaccacgcccggctaattttttgtatctttagtagagacggggtttcaccgtgttagcctggatggtctcaatctcctgacctcatgatctgcccacctcagactcccaaagtgctgagattacaagcgtgagccaccgcgcccggccttaacagggtctttcgctgagcaaatgtttttaactttgaggaagttcattttatatattttttctcctgtggattgtgattttgttgtcacatctaagaattctttgcctagcccaggatcccaaagattttctattttttttccctaaaagttttagttttgtgttttacatttaagtcgctgatctttgagttaatttttatacaaggtgtgaggtttagatcaagattcattgttattattgtttcagcctatggatgtgtaattgctccagtaacatgttgaaaagactggcgtgctttctttccctcattgcttttacatctctgttgaaaatcagtcggtgttccctgacaggtgcagatactaaaaaataaatcagttgggtgtatttgtttgagtctatttctgggttctgtattttgtcccatagatctgtatgtcagttacccctctcctaatactagatggtcttgattactgtagttatagagtaagccttaataccggggtgactgattcttcccagtttattcatctttttcaaaatcgttttagttgttctagttcctttgtctttccatataaattttaaaacaatcttgtctataattaccacaaagtcttgctggggttttgttaggaatgatgttacttatggggagaattgagatctttactaggttgaatcttccgatccatggacatggagtgtctttttcttctttaatgaaagcttcagatgtgaagacagttgtggcgctgcctgttgccgtgcaccgagaggtgctgttccagggagaacacagtcagcggcaggacatcaggttgtgtctttgctcacttctgctttcttggtttttaaatttataggcctatgaaaggaggttccctacatgtcctttgattccgatgttcgtgggcagtgacactgtgaatgaattcaagagcgaagatggggctattcatgtcattgaaaggcgctgcaagctggatgtagatgcacccagactgctgaagaaggtaaaggtcggaaaggacgtcttggagggaaagggcgtcctggtgggagagggcgtcctggtgggagagggcgtcctggagggagagggcatcctggagggagagggcgtcctggagggagagggcgtcctggagggcagcccccagagacaacatgaacttatactatagcttctgtgctattggttgttattaataaacccatttctctttcttttttttttgaagattgcaggagttgattatgtttattttgtccagaaaaactcactgaattctcgggaacgtactttgcacattgaggcttataatgaaacgttttccaatcgggtcatcattaatgagcattgctgctacaccgtgagtaatctgtcactcggcggaagatgttctgccgacatatggcttctgaggattgtttgatcaccattttaaacagtgcatctttttgtcttagagggcagttcttcattagatgttgtcactcatttctcatgtgtaggaggaagggtagcaggtgtggtctcctgcagagtgtattatgttgtcgtggcagttaaggcagccaagtgatgccttgatttggttttgttttttttttcttttttgagacacagtctccctctgtcgcccaggccggagtgcagtggtgcaatctcggctcactgcaacctctgcttcccgagttcaagtgattctcctgcctcagcctccctagtagttcggattacaggcaagcgccaccacgccaggctgatttttgtatttttagtaaagatggggtttcaccgtgttggcctggctggtctggaactcctgacctcacgtgatccaccccttggcctaattttttttttttttgagatggagtctcactcttgtcaccaaggctgaaatgcagtggcacagtctcagctcactgcaacctctgcctcccaggttcaagttattctcattccccagcctcccaagtagctgggattacaggcactcgccaccacgcccggctaatttttgtatttttagtagagacagggtttcaccatgttggccaggctggtctccaactcctgacctcatgatccgtctgcctcgtcctcccaaaatgctgggattacaggcgtgagccaccacgcctggccttaaatattacattcatatgccacttcttttctggtcttactgtaatatgttagaaatatctaatgaaggactaagatgtgtgcctttaagaatagtgccgagagtgtttgtctgtctcagtatcttcactgcttaccaccctgtttcaagaacttcttttatcagatttttagaatactctcctgacagattgctgtatttctgcccttctcccctgcagtgtatccttaacactgaattcaaagtgatctatttaaagtatgtcagattaagtcacttctatgggctcaaaaccctggagtgtttccacagttcgcccagaggaagagcccatagtctttatggtgacttgcaagggcctgagttctctcctggttacgcctttcctgtccttgctgtcatgcagtgggcctcccccaggggctttggctccaaggtgctcgctgtgccgtgctattcttccctacgtctctagtctcacctcctcccatctcggctcaggtcaccccttcttggccagccccagccacccatttaattctgcagcctgactccccaacccccaggcttttttttttttcttcagggatgggatcttgccctgtcgctcaggctggagtgcagtggaacaatcagttcactgcagcctccacctcccaggctcaagtgatcctcctgccccagcctcccaagtagctgggactataggcacatgccaccgtgcctggctagtttttaaatttttttgtagggatgaggtcttgctctgttgcccaggctggtctcaaactcctggactcaagtgatcctcccaccttggcctcccaaagtgtcgggattgcaggtgtgaaccatcatgcctgacccccatccctggttcttttagcctgtgctccaagttttcttttttccatagcacttacttatctttaatttccttgcatactgtgtttctggctgattgtctcctctgttagactctgttgaaagcttccaaggccaatacctctttgttcatgatggagaagactgttcagtgagtatgttgaatgaatgaatgaagcaagaatgaaaatgaagctctccttttatagtcatctttgaaatgtttttgaacaattatttggatctcttcatgatttagaatgtgcttttgatcctgattttgaacatgattttggcattttttccatctgctgtctttatggtagtagcattgttagtaacgtaagtgtttttttctggttactggttaaactgaggagcaggcagatgatattctgttgtcaattcagtcagtgagagtgctttctctttatctgcaggttcaccctgaaaatgaagattggacctgttttgaacagtctgcaagtttagatattaaatctttctttggttttgaaagtacagtggaaaaaattgcaatgaaacaatataccagcaacattaaaaaagtgagtgtatcttgggattttgtggcagagggtgggcaggagtctctgagatgaccatctttttggaaggctggggatggcttagcaagggatttgcagcatttcttgggtggaagatgctatgatccctaccccctgcctcatctttaggtataggggttgaggttgtgctggttgctgatggaggaaggaggtgcctgtagctctagcaatggcactgtctgcctggagttgctgagagagttagaagttggggagaggcagcagcagctggcacacagcccccaggccttgctgcaggattgggaggaggcctgggggcctggggaggtgcttgccgagcaggctgccccccttggattgtcagttcttccacagaagaccttcctttctcgtttttgtgctgttgttcatcagttgttagggaattgtggttttgaaatctatccgtgtgggattatggagtggtttttgaaggctcattttcagggtactgtgttggaaagaattgaaattgagacagaaatcatatattgagtacaagtaccctaaatcagcattttaaaatagtcatataaaaattccatctcattagataccatttcctaaaccttggaaaataacaagtaaaataaacaaaaacacagaagcatttggccttttctttttttctattaattttgtagcaattcagttttattggtgttttaaaagcttgtgagggactgggcgcactggctcatgcctgtaatcccagcactttgggaggctgaggtggacagattgctcgagcccaagagttcgagaccagcctggacaacattgcgaaaccccgtatttacaaagaatacaaaaattagccggatgaggtggcatatacctgtagtcccagctactggggaggctgaggtaggatggcttgagtccaggaggtcaagggtacagtgagctgtgatcatgccactgtgctttagcctgggccacaaagcgagaccctgtctcaaaaaaaaaaaaagattgtgaggctcaccatcttccgttggctagaaaaaaagaaaaatcttgggagagatgagtaatttgaatgttgaatatatactcacctttaaattggttttgttttaaagggaaaggaaatcatcgaatactaccttcgccaattagaagaagaaggcataacctttgtgccccgttggagtccgccttccatcacgacctcttcagagacatcttcatcatcctccaagaaacaagcagcgtccatggccgtcgtcatcccagaagctgccctcaaggaggggctgagtggtgatgccctcagcagccccagcgcacctgagcccgtggtgggcacccctgacggtgggtctggcaggggcttcatcccgagagcaaggctagggaagtcggcgttgccgttttctctctgtttgctctgcctgttcccgcttccttggaacattagataactcagaaaggaaagacccgtctctcgtttctggcccttgtcctctcgcttatgtaatacattcattttaccttttattagattttttgttaataggaaggattatatcaagttatttttattcttttatggataccagaaggtgtttgtttgtttgtttaagaaatggggtctcactgtgttgcccaggatggtcttgaactcctgggctcaagcaatccttctgcctcggcctcccaaagtgctgggattataggtgtgagccaccacacctggcctaaggaaggtgtttttttttgtttgtttgtttgtttgttttgagatagagtattgctctgttgcccaggctggagtgcagtggtgccatcttggctcactgcaacctccgtctcccgggttcaagtgattttcctgcctcagcctcccgagtagctgggaccacaggcatgtgccaccacgcctgactaatttttttatttttttatttttgagataaaaaagtctctgtcgcccaggctgcagtgtagtggcacaatctcggctcagtgcagccttcgtctcctgggttcaagtgattctcctgcctaagcctcttgagtagctgggattataagcctgcaccgccacgcctgactaatttttatattcctagtagagacggggtttcaccatgttggccaggcttgtcttgaactcctgatctcaggtgatctggccacctcagcctcctgagtagctgggattacaggcgtgagccaccagatttcttacattctccaacacagtagctccattcaaaatagatttagatttgcttggcttttttttttccataaattttatatcttgcaagtcctttttgtgttatgttcctcttggaattaaaacagtcattaatatctattatagtcatgaatagtattgtgatttggcaatagaggtaactcagtggtaatcagggaaagataattgagtcagaaagtgtacctgtggtttagtcagtgatttgatctcagagcctatccctcaagtcctctaaggaatctggtttacatctgccatctctgcggtttcatgtgcctctaggactctaggaccacacgttaactccactgagcacaaagactttgggagcctaaagctccagtgttctttgttgtaaataaatgtcacttacattccagacaaactagatgccgactacatcaagagatacctgggcgatttgactccgctgcaggagagctgcctcattagacttcgccagtggctccaggagacccacaagggcaaagtgagtgtcagcaccacacccagtgtgcagggccagagctacgtgaaatcatggaatctctttctgtcatagtcaccaagagtgatattcccaacttccacggctgggaatgtttcttccagtttagaagtcattgaatttatgtctctgtggaatctaagtcgtttatagcaagtgataatgcatgactaactgcatttttctagactttacagagcaaggtctggctacaaacagtgtcacgtcacaaagcaacatgtgttccaagtattcacacattcaaattttcagaaggtgtaaaaagagttcagagatttatcagagattagaaatgtttgagctttaattttcaggtttttggtgaaattttagcctcataaaggtgtaaatttttatggtaagccttatgtagtgagcagagcctggtatgtgtctagcgagttattggcattatttagtaaagggaaactaggcattgcatgtatttggcctgatctctaattctgtcagcctgcttactagaaaccaaataactgagtgctgttgaataccagtcatcaagaaaaccactgcagtgatgatggccaccgtttgttgtcttcttaccatgtattagacactgttttcaggtctttattccatccttccggcagctctctctgctgctgtttttctcactggttttacacgtgaggaaactgaggcacagagcagtgaagtaacctgcctgaggtctcacagccagcgagtggtggggtcaggatttgaacccaggccattttgttccagaacctacattcttaaccacttccacgtaactgtggtcctttctgagtgaagatgatgccacgtcagtaggccacatgcttttgagttatttcgcaggagttggggtcatgaatagctcatgttcccacccccttcttgttctgacggaccagcctcttgagttggtaaacacatggccacggaggaagacacttggtccacgtgacactcggaacacggccttggccttgttctttattcagggaggccaacctgttgattgacagtaatggaacctggagaagattcctgcgtgttagtcagcaatactgccacatcatgaaaacccaacatgctttttttgtattctttttctttaatctgtagtttttgtttttaattatcttaagtcttatgatcactcataatttttaactttgtgtatatcttctctactttaatctttctaatgagttggcaaaagcaccattgccagtcacgtagacacatggtagttctacagttttatgtttttgaatttttttttttttatatatgtatacagagtcttgctccgtcacccaggctggtgcagtcttgggtcactacaatctctgtctcccaggttcaggctattctcctgcctcagcctcctgagagctggggttagctctgccaccattgctggctaatttttgtatttttagtagagaacagggttccaccatgttggccaggctggtctcaaactcctgacctcaagtgatccgcctgccttagcctcccaaagggctgggattacaggcgtgagccactgggcccaacctcgaatgactttttaaagacaatgctaaattataacttagtctgacttaagtagtaaagaattcaaaagtaaagtttaacttgctactatttcttgtcatactgacttttaaaagcatctgaccttatagattgtctataaaatgtgagaagtgttaaatattccttatttgatattacacataaactacactaaaatgccttttaataaataaagggaaccattttagatacaggaaattctaattagattggcatagttaaggccaaaaatataaagtagatattgctgccttatcttcagcctttgcctttaagaggcaaataaatacaaaatacaggtgagtcttgcttggttctgagacagtgaagggatttcctcagtatttaaatagagtcatatggccagttatgtaaacccaaatataaaaccaatctccaataggctttaagatggcatttacgatctttgtgaaagttgaacattactagcgaagtccagtcacatctttagaaggggaaagcagtgtagcgttactgaatcagaattattaaaattcagaaaaccgaacatagtcctttaaccacaagccagccttagttaaatcaggattgcccaaccaaactattctgatgatggttcatgatctgaattctggtgtatgagatctcttttttttttttttttgagacggagtctcgccctgtcgcccaggctggagtgcagtggcgcgatctcggctcactgcaagatccgcctcctgggttcacgccattcttctgcttcagcctccccagtagctgggactcaggcacccgccaccacgcccagataatttttgtatttttagtagagatggggtttcactgtgttagccaggatggtctcgatctcctgacctcatgatccacccgcctcggcctcccagagtgctgggattacaggcgtgagccaccgcgcccggccatgagatctgttaaattatgatatgcattaaaaagtcatgacatttctgttttgtaataagacagtgaccaattattactcattagaaggttttttgagataaactttcaagtctgcccttgccgtcttctttctttttttttttttttttgagatggagtttcgctcttgttgcccaggctgaagtgcagtggcgcgatcttggctcactgcaccctctgcctccaggttcaagtgattctcctgcatcagcctcccaagtagctgggactacaggcgtgcaccaccacgcccgactaattttgtatttttggtagagacagggtttctccatgctgctcagtctggtcttgaactcctgacctcaagcaatccacctgccttggcctcccaaagtgctgggattacaggcctgagccaccacaccccgccagtgaagaccatttttgttccagggattctccaaataccccatcagtgtgtcctcactccaggtgatgcttttgttcttattggcatctgtgtataagagaatccagcagcctgacctgtcgtctgcccggagagacggtggagatgtggcccagtcttgtgcttgcttcccttttccatggtgtggcactgggcggcaccctttggaacaaaaatcttgcctttctcaacatcatccatgtttaattctcttttgtctctggcactacgaaggtttccattcagaagccaggtgtcctgctctctctttattctaactttttatttaaatgcagtatgtatacagaaaagtgcaaggatcatagtcattcatagatccgttcatagagttgaagcatttgatgtttagggaattatttatgcctttgctctactttgcggaaacgaaaatgaaatactataaagattattcaaactgataatgctgattttctctagagtagtaagggagatgtttctggtaccacctcatttttaatagtataatagtgcagctcactgttgattagaagtgggagtttcaggccagacatggtggctcatgcctataatcccaacactttgggaggccaaggcaggaggattgcttgagctcaggcgtttgagaccagcctgggcaacatggggaaaccacatctctacaaatacaaaaatgagctgggcgtggtggcgtgtgcctgtggttccagctgctcaggaggctgaggtgggaggattgcctaagcccagtagttgggggctgcagtgagctgagatcatgccacaacactccagcctgggtggcagaataagagtccctgtctccaaaagaaaagtgggaattttagggtcttattcccttagcaactttttttttagggcagtaatgtgatctcggctcgctgcagcctccacctcccaggttcaagtgatccgcctgcttcagcctccgagtagctgggattacaggcatgcaccaccatgcctggctgatttttgtatttttagtagagatggcatttcaccatattggccaggctggtcttgaactcctgagctcaagcgatccgtccaccgcagcctcccaaagttcccttcacaacttttaacattgcttagaaatgtctttttctcttaatagattccaaaagatgagcatattcttcggttcctccgtgcacgggattttaatattgacaaagccagagagatcatgtgtcagtctttgacgtggagaaagcagcatcaggtagactacattcttgaaacctggacccctcctcaggtccttcaggattactacgcgggaggctggcatcatcacgacaaaggtaccggatggagttgaaactgtgtttccatcgttgtcttgatgtgtggttgaagatatcttccaaggcctccttccctggagttgagtggggcccccttgagtgcatcgtttctcctcactctgagaatttggcacctttcccaagttgaacagactgatacgtgtcaccacgggcacactcccgtcccgccccgggcagccaggaagggcctgggactgctctttcctcatggacacacgtcatccttgggcaaatgacttcacttgctcggtgcagtacagtttgttttgacctattaaaaagacagcagtgcctctggcagagtattttcagtagtgcagtgttaataaagggacttttcaatgacttaaaccctatgatagcttaaaacggttcagcccggttttctacatcacagccctgagcacttcagttctgctttgggagtaagtaaggcctggatgaaggggggcgatgcacctgaaatgaagagtggtttaaatgagaaccttaaaacacagttcccccaaatgccttccataccctgccttgcaggaagacctgcactgtcaaaaatacactctttcctgagccaaagtttgagagccgggcaggatggaattggaaacgtcggcgagagggaagcaccgtagaactggttcttttaccctctgaacaagtccttgcagaaccgagcagctcagctttgtctgtgattatgacttcatcttttgtattgttaaaaagtttggtagtaagacattgacaaatgtgtcttttttttttttttttgagacagagtctcgctctgtccccaaggctggagtccagtggcaagatctcagcctactgcaccctccaccttccgggttcaagcaattctcccgcctcagcctcccgagtagttgggactacaggtgtgcaccaccacgcccggctactttttgtatttttagtagagatggggtttcaccatattggccaggctggtctcgaactcctgacctcgtgatctgcccaccttggcctccaaaagtgcaggaattacaggcgtgagccattgcgcccggcctcaacaaatgtgtcttattaaacgttgggagaaactttctgtaaataggcctttccgtaagattttggagcacataaaaatgttttgctttaagtagaccaggtctagagctagactctcctgggagatgaagttcactaggtgacaaatacaagataaatgttaccctctaaccctctgccccatgctgggacgacactgctggtcttctggtaaccaccgaagacaagtcttggttccttttcaggagcacaatcgtctgtattcctcctgctgcgccttctgggactgtgcggcaggaggctaggcagtgctgactctagggatacactatggccaccaagctctttttcccctttgtgtagatggcccatgatgatagggcagtatgataggagttaggctcctctcaggcggcacccattagacctccaggctataaagaagtagagtcaggccaggcccagtggctcatgcccgtaatcccagcattttgggaggccaaggcaggaggatggcttggacccaggacttcaagactagcctgggcaacacagtgagttgttgtctctacttaaaaaaaaaggaggctgggcgcggtggctcacacctgtaatcccagcactttgggaggctgaagcgggtggatcacctgagatcaggagttcaagaccatcctggccagcatggtgaaaccccgtctctactaaaaatacaaaaattagctgggcgtggtggcacacacctgtagtcccagctattcgggaggctgaggcaggagaatcgcttgaacctgggaggcggaggttgcagtgagccgagatcgtgccagtgcactccagcctggcgacagagcaagacttcgtctcaaataaaaaacaaaaaaggaggcccagcacagtggctcacgcctataatcctagaagtttgggaggcggaggcaggcggattgcctgagctcaggattttgagaccagcctgggcaacacggtgaaaccctgtctctagtaaaatacaaaaaattagccgggcatggcagcgtgcgcctgtagttccagctacttgggaggctgaggcaggagaattgcttgaacctgcaggcagaggttgcagtgagctgagatcgtgccactgcactccagcttgggtgacagggagagactctctctctaaaaaaaataaaaaaataaaaaaaaaaaaaaaacagagtagagccaacacaggctgcttggtggggttttaaggatttttagaatgttctcatttgtcttggtccttagagtgggaattgagggaagctggcttttaaaaagctttcattcagtttttagtaatctatgacatgaaaaaaaatgattttctaagaaagaaaattttaaaagtactctgtagtcatagaaaaagtgtctggatagtttgatgttcccttgccgttgaaaatcagagctcttgggcagccccagttgttcaaagtgagcccagcttatgggcagttgttcagactgagcccagcacttatgcagctcgagctgagtgagtcccagccggattcccctcatcccggcacagccttctatttccaggaccctgcacagctaccctgtcagttggtttttatttttctcgcttacagctttttggggtaaatattggacacacaccccctatcacacaaatcagttgccacttctaagaatcagaaagacttttaagcgcccctagaacacaggcgaacacatattcctgttaagggtcttagagttgtatcctcagtttcaactgggatggtgctgacaactcattccttcccctcctctgcagatgggcggcccctctacgtgctcaggctggggcagatggacaccaaaggcttggtgagagcgctcggggaggaagccctgctgagatacgtaagtgcgcggctgcgagactccaggtgccactgtggcgtcactttttttctctgccagtaggattggggtgttaaccagcctgttagaacaaacatgaattgcttatgtagttaggactgaaaatatattaatatcgtcttaaaatttcaaaaggagacacagaagttataaaagtgtttctcacagtggaagcgtcagtgaggcagtcagggtctcccccgagatgcctgtgtagcagcagtttgagtcttttcattcactcccatgtggaattgccctctcttgggacgccactcacagcagacctcttgatagcattctttccactggcccttcgttaacgcgagctcttggcgtctttctccagaccctcctgaatgcctgctgacccatcatctcgctgactccagccaggccccgctccactgctgccgccattggcagctgtgcttccccctcccagagaagaagatggtccttcaatttgaaaacaaacagaaacttaaaagacgtatttatagccccattatcctgaaatacgcatttttggctttattttttattatgttttttgagacggagtttcactcttgttacccaggctggagtgcaatggtgtgatcttggctcactgcaacctccacctcccaggttcgagtgattctcctgcctcaacctcctgagtagctgggatttcaggcacccgccaccatgcccagctaattttttcatatttttactagagacggggtttcaccatgttggtcaggctggtctcgaactcctgatctcaggtgatcctcccgccttggcctcccgaagtgctggaattacaggcttgagccaccctgcccagccagctttttttttttttttttttttttttttaaagagacatcgtcttactctgttgctgaggctggggtacagtgtacagtgtctattcgtgggtgtcatcacgactcactgcagcttcaaactgctgtcctcaagcagtcctcccacctcggcctcctgagtagctgggactacaagcaccaccactgagcctggctcactgttggcattcccttgtgtattgtgttagtctgcccccaccgctatgtgtgtttatatatccccacatgcacacgttcacacataaagatagggatggactttatctacaggggaggggtttattaacctaaagcaaaggatcgcttgagccatgccttacatctgttctcaggctgccttttctcttggcgggcacatgtggtatcagagtgttctcacactcacagacattcatctcctgttcccatgcacttgttctgaagacagagccccagagccaggcccctgctcatctggggatacctctgtgcttcactttggatagccgttacctttgccacacatgacagtgtttattctctttcaaaagtagaatttatttgttggtggtgatgtgtttagcgcatgtgaatgtgtaagaaaatctccataggtgacttttttgatttacatgcttatctgtaatacgctgttagtgtccctcttccatagctggacgcggtagttttagccttaaactaatcatggtaaattttcatgcccttttgtatgtaggttctctccataaatgaagaagggctaaggcgatgcgaagagaatacaaaagtctttggtcggcctatcaggtagatgtgggattttgtttttcctttcaacttactgagaaaacgaattaaatatttctagttgatttttggaattaaaatctacttattattttccaaggtgctctaaaaggtagacaagaagtgaacatgtaatatgccagtgacgagggacagacagttagtgttttttgaccccaggcattgctgtgacgtcagccagagtgggttggcctgtctgcttagtctgtgcgggccgcaggagcccagggctgcagatcgtttgcttgtttttgcctcccctccccacccagatgactctgtgttcttaaaccaagctctaagttacagtaaagagttctgaaaatgtttagtgattcagaggttgacattgataagggtgtagatggttcactgggatgtaagttccatgagaacagggtttttgagggccttttgctgactgctgtattctcagctcctgggacagtgcttgcctctctctctgttgaagcatagcccactgcagttcagatgcaatatgtgttaaaataccagctgtgtgccctgttgatggcaggttggggggtggtttagcacgtcgaggacagcacactgtggctttgcttgccggctcactgagcatatctgagagagcttttcgtgcattatcagtcagccttaattgcagtttcaggccttggtcctaccacactgatcctgtgtgttttgtacaagtagatataaacagggttcatagcactatacatagcactataatttaaaaaaattgattatgatgtatttggaaatagctataaatgaccaaaaaggaagaaaataagacacagtttgctaagtgtgctgtctgttgaatgaaacacatctctgcacaacctgcagctcatggacctgcctggtggacttggaagggctgaacatgcgccacttgtggagacctggtgtgaaagcgctgctgcggatcatcgaggtggtggaggccaactaccctgagacactgggccgccttctcatcctgcgggcgcccagggtatttcctgtgctctggacgctggtgggttgagatgctttttgcagtaactgtgagccatttggaaagcagataacatgcattcatatacacgtgtctgtgacctaaagtcttaacttcttaggaaaaaaaacaataacatgcaaagatataaaatttctcaaattgtttaagaaaggggaaaaacaaaatgtgagtgtcctaatgccatgcaaatagactttacagaagaagtatataaacttgaatgtcttccccccaccctcccactcagaataccacattgtcattttaatcttggacactcaggcagcagagaaatatgactgcatggtcttctcctcctcacaggttagtccgttcattgatgacaacaccagaaggaagttcctcatttatgcaggaaatgactaccagggtcctggaggcctgctggattacatcgacaaagagattattccagatttcctgagtggggagtgcatggtatgtcctgaggcgaggaactgcacatttggccccttatgcaggtgggagaggtcggtgtcgatttgcacaaatgattttcagaacttccagttgtttggatgttttgtttttgttttgtttcttttggccgccatttctctgatccagggttaagctaaagagaaccattgaagtaattgttgatactgtacatttcttcattgttaaatacgaatgagaattcgtagaatcaaatacgattgcagcttgctttgattcacacggctttgtgtgaatcagatctttaaacaattttagaggagctgtcatattttctaaaatactgttaaaaaattgaatcagttctcaaaatttcccacccgcccctccccgtccttttttttatggagacagggtccggctctgtcacccaggctggagtgcagtggtgcgatcacagctcagcagcctgacttggtgggctcaggtgatcctcccacctcagccacccaagtagctgggactgtaggcgtgcaccaccatacccagcgaattttttgtagaggcagagtctcactattttgccccagactggatgacatttttggtttttttttttcttcttgagatggagtcttgctctgttgcacaggctggagtgcagtggtgcaatctcagctcactgcagcctccgcctcccagattcaagcgattcttcagtctcagcctctggagtaactgggattacaggcatgcgccactacccacagctaattgttttatttttagtagagatggggtttcaccatgtcagccaggctggtctcaaactcctgacctcaagtaatccgcccacctcggccttccaaagtgccgggattacaggcatgagccaccatgcctggcctggataacatttttaaagtaaaaaaacgaagggaagtggttctcaacatacgtttggggtttttaatatactgagttgctgggtaatgaagcagaggcctccacttctatatcctgtactcagagaagctcagaaccttggggtccttataggcttctagcccatggtgcacagttgtgtcttgggagcattacggaagccagagcctctagaagtcccagtgacttgttccatggcacacggcggtggctgaactcagcagggagtgaagctccttttcagaagggctctctagtcatccttcatatgaaaagttacccgtttggaatgtgtacccactgggtttgactcaggtatttagctaatgaattggacattcaggggactttggactttctgaatggttagagaaatttagaaaacaaatgaatttagctttcacttcatcagttccactttaaggaaattacaggcatcatcacagtacaatgcaaagagcaagtaagttacagtaaaggttataggaccagaatttagcaagcgcctatgaggttaaaccgcaggctcaggttcgtagaaacctctgaactcctttcatgatatgagctagccatcccgtgttgttgctgcttccaattatgacacgaagaattgagctggagcccaaggagacctgcctcaccgcgttgtgcctgtttgtcacatgccgacctccgtagtgtgtttgcggtgctgagcgtctttgtggttaattgaactgtccaaaaacttgggccttctaaggcttcttcacctctctcctgagctgctgttgaggctgattgttgaaaggaggttgttccctcctgctctctggtggccggaggttactaaccagcgggcagtctggtatttttccaccacgacatcactgctttgacacttatgctgtactgcaggctgaagactgaaatgtttattttctatgtagttgcttcccaaggctaatagaacgaggacttcgattttatgaactttagtgtggagtcattgtgtcaaggtcaattaggagatttatgttatgtacaagttctaattcaacttgtttcaggcaaattcaaaagaagttcttcattagtttttggctggtgttatagaccagtcatttgactttagacagaaaacattattcattgattctgtatcttcactataattccctatcataaaaataatgcctgtggctattgagagcaaaactcttttcttaaagtaatacttttcctttacagggcaatataaatacccctaatgcttatatgagtcagctttagtaactgggtgcagtgcctcacgcattttagtaggaattctgtggtacatcagcttcaacttgttcccgtttatgcagagtaaaacacatgtatttaagtggtttttaaaaacatattgctcagtagtgcagagtgttttacgaccctgccagtgttttccattttctcagcaacctccagaagttgagtgcagggggatagtgctggccggtgtgtctgggtttcgtggggttggtttgtgtttgcacaggtttcactgctgtgtttcttcttccagtgcgaagtgccagagggtggactggtccccaaatctctgtaccggactgcagaggagctggagaacgaagacctgaagctctggactgagaccatctaccagtctgcaagcgtcttcaaaggagccccacatgaggtacgtcctccgccttcctgcacctgggccggcccttcctccgcagagggcctggccctcgcagggcttcctggcagcctttcattcagaacagtccactcgtttttctgctctttgtctttaggcttttgttgacactcgatatttagtttcagtaaatgtcaacgtcgaagaatgggtctctctcagaatagaaactagctgtgcttgatcagagtgcctggaaaggaaattggatctcttgacctccattttactaaagccaccaaacacagagataggaatagctaatctttccttgttggagcacttaactcctgaatttagtttatttcatggttatattgaacaagtttcatgtgctactttttctttttttttttctagacagagttttgctctgttgcccaggctggagtacactggcatgatctcaactcactgcaacctccgccttatgggttcaagcaattctcctgcctcagcctcccaagtagctgggattacaggcacccgccaccacgcctggctaatttttgtatttttagtaaaggtggggtttcaccatgttggccaggctggtctcgaacacctgacctcaggtgatccacctgccttggcctcccaaagtgctgggattacaggtgtgagccactgtacctggcccgtttgctactttttcttggctgggttttggttatttatagatatcttggggattttccgatttctgtaagtctaatggagcaaggagggtgttcctgtattccttttttgctgtcacttttggtagagaagcaagggcgttccgtgttcctgtgcatgccatatgtctgtcctgtagcatcacgagtgacctgaagcaggaggggcctgcagcggaatctcccttctcagctaggacaaggttcgtggcccagagttgttggagaggatggtggcactctgtgcagagcaggtgtcagtgaggatgtggtgctggcttgggcaatggtgctggccgggagctgactgcggcctgcttcctgccgtggtggcacctgggtcagccatctgccagtggcttctgctggggtgtcttcctgagtggctcacctggtgcttgcagggcaggtggataagggaatgctgttgccatggtttgaacaagcagagacagatttggtgtgccttacttgtagatacatacatagaggaatctcagatttcataacgtcttgaggattgtctgtattcatttcttaccgggagggcaggctccagggaccgagtccttgttccttgtttgttaggcactatcgctcttgtccatgtttcaagaacttggggtgcagtgtgtttcgtgtgaatcgggggcatctgtagacatccacatggtaaaaacctccgttctgctttgggtattaaataaagcacagatccgagatggcaacaaactgaaaggaaggctgaagcggaggcccccactgtgaatgcaggaaagaggttccgtcagcacagggggccgaggcctcaggatggagctgcctggggagccactttgctgaagagggggccgtgccacgtggtgccgcctgctgttcttagacaggacccttgtacctcactgaatctgctgtggaaggacattctgaagtggcgtttcagtggtgaggtggcagtggtgggattaaaggggcccggctcgtagagcagccacgcgctgaagggcacagcagacagcgtgcatgggctgagaggggccgtgggcctggctctgctgcttccttaggtggagttttcagtgactgcagaactctgcacagctgcttttcattctcacgtccgcccccgcccaatctttgaaactaactttgattattccctcctgggtagctctgtcggtgctgtgtaagtttggttttcaattggttctcagcacccagggggtgaccacctcaaccccatctctactatgccaggggctcatcccgctcacccagcctcgccactgttctctcgtgtgagcctcacacggcaggcccggttccatgcccctgcttcccccttgctgggaacgctgtcctcaggctcccctgcctgctctttctttagctttcaccttctccagggccttctgttctgtccagcccagggcagtcctctgaaccactcatgtacgagctcacagtgtttggtgtttctaagacctggcctcttagagtgtgtgtgaagatggtgtatgggagatcttggacctctaggtgcaggtcacaaagaacacagagcttggtgcatgacatgtagcaggatccagcggttgaatggatggtggtgtgtgactctggggaaagagatccgtccatacgcattcagcgtttccctccccagcttcagcacctgcaccctggatcccctggagagcacgatgcgctcgcagcatgccggcctggtgctcgtggatcgtggctgcctaacgctgcctctttttcagattctcattcagattgtggatgcctcgtcagtcatcacttgggatttcgacgtgtgcaaaggggacattgtgtttaacatctatcactccaagaggtcgccacaaccacccaaaaaggactccctgggagcccacagcatcacctctccgggtgggaacaatgtgcagctcatagacaaagtctggcagctgggccgcgactacagcatggtggagtcgcctctgatctgcaaagaaggagaaagcgtgcaggtaaaatcacacacaggtcaaatcgcgcatccgtgactccacacggccaggtgattctgtcttgagtagactctttgcttcgctccttgagcagccctgtgtagcttttgaggccctgcttgtggaggagcagcttgcctggaggagcaggaagccaagtgggtctcgtaggaaggagttcaggcctcgcagtggttttggacagaatctgcgacttttcccaaaagcagcctgtgacaggaagggaaggcatcgcacgcacgggcccagctgggcttcataggatttttcccccccgcctcatttcaccgggttgtgtttgtctttttcaaaggaaaatcaccctaaatagaagtaagagggacaagtacttagagaactattagctctcattaccaaaccttctaatttgtttcaaatgctttcagttcccttttcacattgtggctggttattttgggtgcctgtgctcacagtagcctcggggcgggggcattgcttctggccttcataatagatgcatcgttttgctgcctttacagttttcaggggtaaggcttgtcagtgtttcagtggtcttagaggcagagtaaaagaatcctttgtccattttaaaaacaatgaacagctaagctgtgttaaccagtcatgaatttcggagagaatggagaaggagctttccacggattgacggctcactttagggtgacgtgccttcagccccgaacatgctggatgattggcagcatgtcagagaaagtgaggccaggtccagggaagctgtgctgagccctccctccagcatgggtgccaccagcctgccaggctcctgcctccgtaggtggggtgggctgggcaggcctcgtgagggccacggacatggagcttgtccctccgggcttcccagcacccgggagtgaccacactcagtagagggaaggacattgtcaaacctgctgctgaagcaaaatagcaggttctgaatcccattgagatagtttccgtagctacatgaaatcctaaagacagtccccttggcgcttgtcaggcctgtggtaggccaggggtcggaagcgagtcgccctcagctgccactgccctacttgttctagggttcccatgtgaccaggtggccgggcttctacatcctgcagtggaaattccacagcatgcctgcgtgcgccgccagcagccttccccgggtggacgacgtgcttgcgtccctgcaggtctcttcgcacaagtgtaaagtgatgtactacaccgaggtgatcggctcggaggatttcaggtgcggccaccctcgccacagcaggtgctgcggacagctgggcatggttggagggagcctgcagtcccacgccgtgtgcaggatcagcagtggcggcgggtgtcaggaatgcttggagggccaggagggagtggctttggggtcatttgttggcacggtgactccctgcctgtctgcagagggagagtgtcggagacagagccgactgactgcctttgctttagctcacactgccgtctgcgtgcaggctgtgggaagccggtccccctggtgggttactcatgtccatcccccgtttgcaagcactgatggggatgagaagtgagcagagaacagggtgggccacgaagtccagcaggcagtgtgggccggcgggtggttggcagggtggtcctcacgcctcgcccctccctgtgccattacagaggttccatgacgagcctggagtccagccacagcggcttctcccagctgagtgccgccaccacctcctccagccagtcccactccagctccatgatctccaggtagtgccgcgctgcctgcacctagtgtgcagaggggacggccgcccctcctcggacagccagctgcacccgcccacccagcggcgacattgtacagactcctctcacctctagatagcaaatagctctcagatggtaaacgtagtcgtttgatcccaaaactaccttggcaggtagttttaactctgatcctaacttaactcaatagccatagattttgtatacgttgtgcacaaaatccaaccagagcgcaagggctctcttgaaagaaaagtagtttctgtaccaattaaaggattgacgtggtctcagatattgatgcaaaaaatttttccaacgaactccgcattgtccattagtgaatgaattcctgtgacatcctccagagatggcccctcctcacctgggacggaagctgccagctcgcttcccccaagctgcctcatggcccgcacgccgcctcacggcccccatgcttcccgccagtcaagatggtctgtggacttagggccagcccttgaggtccttatcctctgaggattcagaggttgcctgcggagtaccttgtcccagggccagacacacccacaccacccactgtcctgcagtggggccgggggctcaggaggggctctcagggactcctggtgactccaggaaaatgctgccatcgttaaacattactttctctttcctccttttcaaatctttttgatactttttagagcaggatttttctgtatgtgaacttgggtgggggggttcttcccgtttccttccgtgcgtcgcccctctcacctgcagtcagctcccagcccagtgtaggccatctcctctgtgccctctggtggctcattgtcctcagagcccagacagttccagccactaggaggccgtcttggaaccagcaagtcgcatttgccacttgacactgtccatggggttttattagtagctaagcagcagctctcgcatccacttcagggtggcgtgtggcatgtaggagtcctgcttctttgtacatgggaattgtggactcatgcgtgtgtgtgtgtgcatgtgctgtgtgtgtgcatgtgtgcatgacggtgggggtgctggggggacggggtgagtggaaacttagtttgagtaatgaaggaatcttcacagaagcaaatcagaatatgggatttgtttgccttttacattttgtttaattcctgattttaaagcctgctctatctggtacaggcccttattttttcagctttttatgggaaaagcaggttatttgagaatctgtccagaagttgcataggggatggcctccacgataaggacatgcaacacgtgtttctgtgtgcagcagaggccgtgtttttcatgccaaaccccacgcggctgtcaactgtgtgcgtggtaggcatggagatcctggttgtgccgtctcagctccgctctgaaggcactgtgtgggtgctgcgtgactggagagctgtgtggaggccatgtgtgccccgtgcagggatcaggagggcgggggagggaccgagcagccctcttgcccggtcgggtcagccctagtggctgcctgcacactgtagacgtcccagggcctgtgctgtgatcacctgcctttggaccacatttgtgtttgctcttagagatcgagctcctcagtggtacctgaagcctttgcttccggaaagcgcggtagggttcgtaggtagggctagtaggtagggttagtaggtagggctagtaggtagggctagtaggtagggttcgtaggtagggttcgtaggtagggctggtaggtagggttagtaggtagggctagtaggtagggttagtaggtagggttcgtaggtagggttcgtaggtagggttcgtaggtagggctagtaggtagggttagtaggtagggttcgtaggtagggttcgtaggtagggttaggtagggttcgtaggtagggttagtaggtagggctagtaggtagggttcgtaggtagggttcgtaggtagggctagtaggtagggttagtaggtagggctagtaggtagggctagtaggtagggttagtaggtagggctagtaggtagggttcgtaggtagggttagtaggtagggctagtaggtagggttcgtaggtagggttcgtaggtagggctagtaggtagggttagtaggtagggctagtaggtagggctagtaggtagggttcgtaggtagggttcgtaggtagggttcgtaggtagggttcgtaggtagggttagtaggtagggttcgtaggtagggctagtaggtagggctagtaggtagggctagtaggtagggttagtaggtagggctagtaggtagggctagtaggtagggctagtaggtagggctagtaggtagggttcgtaggtagggttcgtaggtagggttcgtaggtagggttagtagcgcgtctgtgctgcttccacctggtgcttcctgttcccaaatcacaagggcctgaaggtggtccctgctttctctttctctttctctgtgtctcagatggcgattttgctgacagctgccaagaaaatgcttcactcaacagtcctcatgtgcccagagatgtttatagaactgtttgaattgcagccatcccctgccccctcccaggctgaagatctgttctttttaagttgattcgggagtggcattcttttatacccaaagactgtagtgcatcttgaagagctcaaagcacatgaccgcacaaatgcttacagggtttcctcccgagtaatccaatctcactccccttgtaagggaattctggggcagctatggtttgagtatgcagtttgcatcgtgtttctacctttagtaccttgccactcttttaaaacgctgctgtcatttcccatttcttagtactaatgattctttgattctccctctattatgtcttaattcactttccttcctaaatttgttatttgcatatcaaattctgtaaatgttttgtaaacatattacctcacttggtaatacaatactgatagtctttaaaagatttttttattgttatcaataataaatgtgaactatttaaagaaaagaatgtctttttcttattgtgaaacaacagtttcccttgaagagtttgagattcttaggagaatttagagattgaagaaagaagagagcttctgaagccagagtactgatgctctagaagttcaagaagagctttagcttgtgtgggagtgtttcacaggtgagcggtccggcctcagaagagctttagctcatgtgggagtgtttcacaggtgagtggtcgttcaagaagagctttagctcctgtgggattgtttcacaggtgagcggtccggcctcaggtcacagccgtatgtttgctgatgcagaagcgaacccagtgtttgtcctcgcttctgtaagaagacatgatgtggtttttcttaaacgcagccagatctaacatcactgtgatggggcgatccctgctgtgatgtttccgttgtgataaaaaggattgctttcatcaggcgcctccaagaaaataaaagaggcaggtgtggacctttagaagcctggattaccttatctccactcccctgccaatcagtgggtcttcggggggtcataaaccagtgggcagagcaggctgctggctcggtgaagctcagggcaggccagaaggcggctcagggcagcgtgccagggtgcagaagccagtgcctccctaactgggaaccgcaggatcattggcattcctagtagtccgtatctgtccttggtgggacacagccaaggggtctggctggcacctgggtgggaagcaggggagaccgagggtgccctgcacgtccatgctgggcctgggccgtcagtgtgtccacaggcagtcaggaccttagccgtgccaaaatctgatgatttagtcaacctgcgatggaaggaagaggctttttacctggattccctttatgccctcatatttctgtgtctgttgtcaagtcggacctactgttaccaagcttttggcttggcggtccagttctcagggtggaagccagaggcagcttggaaactaactgagggtcgtaggatgataacccgcagcccgtctcctgaccaccttcagaaagggccacactgaaatggagtgtcttgaacagcagtgtgtttatattgggccaccaaaccattagtaatgcgtttgttctctgttgttgtgggttttttttttttttttttttgagacagagtcttgctctgtgctctgtcacccaggctggagtgcagtggcacaatctcggctcactgcaacctccgttctcaggttcaagtgattctcctgcctgagcctcctgagtagctggggctacaggcatccaccaccacacctggctaatttttgtatttttagtagagatgggtttttgccatgttggccatgctggtcttgaactcctgacctcaaatgatccacccaccttggccccctaaagtgctggtatttcaggcgtgagccactgcacccggccaatgtgatgattcttaaatatatcatgtttcctttaatactccatctctgcagaactttggcagagcccaaaccgtaggttgtcttccagttcttaagttgtggtggaggcattcttattaatgtcaccatgaaacaaaccagttggaatcagttttgcttgaaaagtgagggctttggaaagccagggattctgggaagatggtaatacaactagactgcaaaacctaaaaccggtggatgactgaatggtcactttaaaatggttgaaatggcagcgtttgtgtatgtgttttggcacgatagtaagaacagcctatggacatcatttacggcaacactagctgataaagtatccccataaaccccaaaccaggggtgagtcggggtaaaccaccaatagtttccagagcttccggacccataggttatccgtgtctgagggagaaagcagaggttacatgcaaaacgtctgatggatgggagagcaggagaagccacgaggccccacgaaccccagtgggaggccagtgtgtgctcagcaggtaacacggcccagctgggctgcacctggagcctggggacacggaggctgttgggaagaggatcgggttgaggggagcagaccaggccctctggactccctggactgacctgccagggctcacttctggaaggaacctcacagtgaggaaataaagcatattccactgcttggagggaataaagtcaagcaggatggggaccgagtctgtgcaggtgcctgggagggtcatgggcagggcagcggtgaaagcagacggatgtgatgttttaaacgtttcacaaaacaacagagggagcaccgcaaaattagagcagctttcttgaagcatacttcattctgaatgtttatgaaatacttttccataaaaatgagcatcagaaaagtagcaaagtcaaacctatagaaggctcagagtagggagcagaataatactcccaccaacaatgaaagcaagccagaaaggcatgcctgcaaaacagaccaaagaaaacacatttaaaaactatttttgttttatttttattttgtattttattttgttttttattttttgagacggagtcttgctgtgtcgtccaggctggagtgcagtggcatgatctctgctcactacaaccgctgcctcctgggttcaagcaattcttctgcctcagcctccctagtcgctgggactataggtgtgcaccaccacgcctggctaatttttgtatttttagtacagatggggtttcaccatgttggccaggcttgtctcgaactcctggcctcatgtaatcaccctcctcagcctcccaaagtgctgggattaaaggcgtgatcccacacgcccagtctaaaaacaattttaaaaatgaactaaaaaaacttaaagaaaatgatatgaaacgtgaaaagcataatcagagttagaaaaactcagaaatgaagtgacagaactcaagaaagattagaaatgcaggaatcctttcagaaattgagacaaagtagagggaatgcaaagtgaaaaaacaatgccaagtgaaaatgaggatggtttttttttttttttttttgagatggagtctcactctgtcacccaggctggagtgcagtggcgtgatcttggctcactgcaagctctgcctcccaggctcacgccattctcctgcctcagcctcccgagtaactgggactacaggcgcccgctaccacgcatggctaattttttgtatttttagtagagacggggtttcaccatgttggctaggatggtctcgatatcttgacctcgtgatccaccggcctcgacctcccaaagtgctgagattacaggcgtgagccaccgcgcctggctgattttataaatcgaaaaggatggaaagccttcaaaagtgatgctgttgaaaataagcaaacacatgagtgccactgaaagagtgagggtctgagaaggaccaacaccaagagtattttaggaaaagttctggacttaaaaaatccttggggcatcctgggaatcaggttttttgaggactgagctttctgccagaaggaaatggattaattaagacttttcaaggaaagagccaaaaattttatgtccagcaagactgacctccacgtataaagggtgctgatacaggccaggcatgttggctcacacctataatcccagcactttgggaggctgaggcaggcggatcacctgaggtcaggagttcgagaccagcctggccaatgtggtgaaacctcatctctactaaaaatacaaatattagcccagagtggtggtgggtgcctgtaatcccagctactcgggaggctgaggcaggagaattgcttgaaccctggaggtggaggttgcagtgagccaagattgcaccattgccttccagcctgggcaacaagaacgaaactcatctcaaaaaaaaaaaaaaaaaaaaaaaaagtaaagggcgctgataaagctatcagtgtgcagcagcttgggcctaccacccttcctgagctatccagcgactaggcttcaggtagtgtggtggagagtcatgagacctggcggtgggctcagggtcctgcccatctgtacagccgaggctaatgagggcaagggggcagtgtgtattggctccgacaatgtattgatcacacgaaagtttttgtttgttttgagacagggtcttgctctcgcccaggctgaagtgcagtagcctgatcgtggctcactgctatctcaacatcctaagctccagcaatcctccagctttagccacctgagtagctgggactacaggcatgcaccactgcacccagctaatttttgtatttttggtagagatcggatttcaccatgttgcccaagttggtctccaactcctgggcttaagcaatccacctgccttggcctcccagagtgttaggattacaggtgagccaccatgcctggcctgtttttgtttttgttttttgttttttttgagacgatcttgctctgtcactcagactgtgcagtggcacaatcacggctctctacagcctccaacttgacctcctgggctccagtgatcctcctgcctcagctgcccaagtaggactgcaggcatgtgcaagtacactcagctaatttatttttatttttgtagagatgaggtctggctgtgttgcctaggttggtctcaaactcctggccctaagcagtcctgccacgttgccatcccaaagtgctgggattacagatttgagccaccatgcttggccagcaaaattgtgttttaaaatgggaggagaatagagggaacatttgcaaatatctgttgttttagtggttatattaggggcagtattaacatcgttatgctgagtttttgtatggtaacaagtgagtaattaggggctgtcctcagccagctttccccaggtcctgtgttgaaggttgtctgtgtggaagatagatcagggagtggttaaatagaagccctgtagtcgccaggtgtggtggctcacgcctgtaatcccatcgctgggagaccagggtgggcggatcacctgaggtcaggagttcgagaccagcctggccaggtgaaaccccatcgctactaaaaataaaaaaattacccgggcatggtggtgcacgcctataatcccagctccttgggaggctgaggcaggagaatcgcttgaacccgggaggcggaggttgcagtgaggcgagattgtgccattgcactccagcttgggcaacaaagcaagactccgtctcaaaaaaaaaaaaaaaaaaaaaaaaagaagaagccctgtagtctcagatttgaattggaaggttaatatgaattcatgaggtatttttatctttaaatgtgtatgtgtggtgagtttaagtgaatttacttagaaacaatgagcagcccattacaaagagaatctctaacatcccgattgaacccaggcgttcctgttaaaatgactcattccaagtctgggacaggaaatgggccagatgagcctgggacgtcttgtcatgtatcacttgggaaaaaagcgatcaaagactattagggggtgggcacagtggctcatggaggcaaacgtggcagattgcttgagcccagaagttcgagaccagcctggcccacatggtgaaactctgtctctactaaaaatacaaaattagccaggcgtggtggcaggcacctgtaatcccagctacatgggaggctgaggcaggagaatcacttgaacctggaagctggaggttgcagtgagccaagattgtgccactgcactccagcctgggtgacagagaccatctcgaaaaataaaaaatagggtcatgtcaaaaggactcagcagactcaaagaggccttcactggccagaaacgagacaagttcaacttgtcccaattattattgtcctataataataattgcaggacgccattgaatgttaagattcatgagttcataattttaatatataacataattttggatgatagggaaccatttattttgaaaactggtaaataagaagcaagcatttatcccagcctttcctaaatgcacgatagatgaagatgagtatctataaaagtatttcaactttcactaactataaaaatgatagaataacatcattctgtaatcctgatgaataaatagatagaaatattaagcatcagctgctaacatcacacacacaaaagacaagcagatgtcctgtgtctcctagagatctacagtcttgccagagttttgttatccagactgaatagatccagtctctgaatccagctgccaatttgcaagaaatagagaccaaggaacctgttgaactgtactgtgggaaactgaagtcagaaggctcaggctctttatcttttttttgttgttgttgagatggaatcttgctctgtcgcccaggctggagtgcagtggtgcgatctcggcttactgcaacctctgcctcctgagttgaagtgattctcctgcctcagccttctgagtagctgggactacaggcatacgccaccatgtccagctattttttgtgtggttttggtaaagacggaccttcactatgttggccaggctggtctcgaacccctgacctcaaatgatgcgcccgcgtcggcctcccaaagtgttgggattacaggcgtgaaccaccccgcccgaacagaaggctcagtctctttaatttgtaggaaatgtcccacccaattcctttctttttcttggagcagatctattgtaagttttaaaacacgaggaagcgatcatcacagcagccggaaagcggctcctccctgggcagaggctgtggtgtggtgtggggtcggggcagtcctggctcctggggtcctctgtgcgcttgtgtgcatttccgtgtttactttacaataaaaaggtttattattgtttggttgttttttgtttttggttaatggctttagacaggttagcttgccttgaagaaaagttaacactggttattaggaactcaggtcgtcttctatccaaatcacggggctgctgtgacctgtggcacaggtgccattgaggacatgtcctgcactagctcgtgtctggtccgatgtgcgtgccggctgtgccgagggcagcagcttccgtgttcctggtcgcttctgttccccaggagagaatctgaggttgttccaattaaagctctgtcccctgtggtgtactgtctgtgacctgtcctgccttcaaatagaagcaaccagactatttcccactccgaccttgcctttgggcttaagaaactgtcaccaggacccagttttgacagtgacaaatcatcatgagcccttactgagtctctttgcactgtccccagccactttatgtccgattagagacacgagggagagaaaaacctgctgcctgccctctctgagctgagaaccagtgaggggcaagaggccggtgcaactcctgaaggagagaacggggtgcagagagaagggggacccttccagctccatctgcagagccatctcgtttccgttgggtgaatgttcagtcccaagttgaaagttaagtccttgtctggctgccaagccctgcctgtcctttccactttgccagggcggtgtattagtctgctctcgcattgctataaagaaatacctgagcctgggtaatttataaagaaaacgggtttcattggctcacggttctgcaggctactggaagcatggcggcatctgtttctggggaggcctcggggagctttcactcatgtggaaggtagagcgggaacaggcttctgatatggcaggagcaggagcaagacacagccaggggaaggttgccacacacttttttttttttgagatggagtcttgttctgtcacccagactggagtgcagtggtgcaatctcggctcactgcaacctccgcctcctgggtttaagcaactctcctgcctcagcctcccgagtagctgggactacaggtgggtgccaccacacccggctaatttttttgtatttttagtagagaacgggatttcaccatattagccatgatggtctcgatctcctgacctcgtgatctgcccgcctcagcctctcaaagtgctgggattacaggcgtgagccaccgcatccagcctgccacacactttttaacaaccagatcttttggtaactcactcactatacagtaccaagggaggatggtgcattagtccatcctcattctgctaataaggacatacccaagactgggtaacttataaacagaaaaggcttaattgagtcccagttcagcatggcttgggaggcctcaggaaacttacaaccatggcagaaggggaagcaaacacatgtccttctccacatggcagcaggaaggagaagtacagaatgaaagtggggaaagccccttataaaaccatcagatctcatgagaactaactcaatatcatgagaacagcatgggggaactgcctccatgatccaattgcctcccactgggtccctctcaccacgggtggggattatgagatttgggtggggacacagccaaaccatattagatggtgctaagccattcatgagaatgccacctgcataatccagtcacctcccaccaggccccaccttcaacactggggattacaattcaaaatgagatttgggtggggacatggatccaaaccatatcagccagtttacacccaagagtgaagccaagcaacagccccctaaggcggaggcccctggaggtagtcctggctctgccaagagtcactcctcctctggcactatcctgtgtctcttgtaacctggctgaagctctcagagcttggggcagtgacagcctttgcccccttcagctctgcccttggagtcagagccacgaggggagaccctccagccctcatgtccactggagtcctacccgggtccctttttttgtgtgtgggttgttggttcgtttgttttttcttgatatggagtttcactcttgtctcccaggctggagtgaaatggcgcgatcttggctcactgcaacctctgcttcctgggttcaagtgattctcctgcctcagcctcttgagtatctgggattacagtcacctgccaccactcccggctaattttgtatatttttagtagagaggggtttcaccatgttggccaggctggtctcaaactcctgacctcaggtgatccacccatctcggcctcccaaagtgctgggattacaggcttgagccactgcgcccagccttacctgggtacttttatgtgtcagcttgactgggccacggggttcccagatgtgtggtcagacattattctgggtgtctgtgggtgagtttaacatttaaatcagtggactgagaggagtagactgtgctccctagtgtgggggggcctcatccagtcagttgaaggcctgcatagaacaaaaagcctcaccctcccccgaggaagagaattctccggactgcctgccttcagactgggacactggctttttcctgccttggaacttgaatgctggctcttcttgggcctcaagcctcagactggaaccctgtggtccgctctcctgggcctccagcttgccgactgcagcagatcttgggacttaacctctgcaatcacatgagccgaatccttgtcatctctgtgtgtgtgattctctgtctctctacacacatgtacatacaccctgttgttctgtttctataggagatgtgctccaaaatcctggaactgcaaaacctttgacttctacaaaaaatgggttaatctggaatcatctctccttggttcgtatgtgtgtgtgtatgtgtgtgtttggggtttttcttcccatcaataggcttatcccaaccggttgcagtggctcactcctgtaatcccagcactgtaggaggctgaggcaggcagatcgcttgagcccaggggttcgagaccagcctgactaacatggtgaaaccccatctctactaaaaacacaaagattagctgggtgtggtggtgggcgcctataataccagctacttgggaggctgaggcacaagaatcaattgaacctgggaggcagaggttgcagtgagccgagatcgtgccactgcacaccagcctgggtgacagagtgaggctctgtctccaaaaaaaaaaaaaaaaaaaaaaggaaaataaaattaaaacatttttgtggacacctaaaggatcatgggcccagtggagaaggtggccctcctcccttcctcagagcccccgagccctgccctgtggggtgggaaagaaggggacctgcccagtgtcacggtcagtggccaagctggacgacaggtaatccctgagtcctgccccagccagccctgccctctgctctcccagaacctagaatctgggggaagattgaacaagctcttccttgaagggagggcgccgcctcctctcaccccctgccacgggcatcggtgtgaggctgtgctgggggctgtgctcaccctctgcgtccccgatggggcagtgtctggtacctgtggagttcctggaagaatctgtgccctgattgccattgtgagctgtgccggggaggctctgtaggagaggaggagcagttagccgactattggggcgtgggacaggctggtcacggggctccgcttcctggagggctgctgctttcgtaggcctggcatccgcccctccagccgcatgctgtctgattgttccctgcaggaggtgccagcccctagctctggcagcatcagaggagcacatgaaccgaatgcttccagaaggctctgcggctggtggggagaaggctctggagaccttcagtgagttgtggcctgttccccgcttctctccgcaccgttggatgagcctcctgtggcatggctggaagggctgggcgctgagggtgtaggcatcaggacagctttgcctgggctgcccacattctctgccctggggggacaggggcagctggcgaagccctcgtgtggtgtctcagtgaagtgcccagtgatgggctagggccacccctgtcctgagcctccccatggccctccagttcttccctccctcccacctgctcctgtctccttcgttttctgtttctgtctgggttgactcatgacatacctgagagcctcctggcttcagcctctctgccatccccagagcaaggagggctcggggggcacacagtgtgggaagaggctggacgggaaggccagagggtcacaatgggtggcgggcgccctccctgctgccccgtctcgcccggctcccagagtcactcattcgggctcactctgggccctcagctgctccctctgatcccagcctcaaaggtgcagctggtctggttagacacgtgttctcagaaggagcagagagtgatgcattaatttatcctttgttgactctgaaagtcaaaagctcccggggaatctggactaatctctctcctagaagtggctgattatttgtaaaaggatctgagcttgctgagtgtcacatggcagtgggacctccatgcaggtccctgagtggccatgccgctctcctccccttcccgcccaggccaggcctccagtgctgtgcttccgctgtttcgtctgcctgggacgctcccgcccctggagaaggagaactcaggaagctcttccctgaagacatttgtgggggcttggccagcctcccttcctgtcccccttgtcccctgcacagacttttgtgcaacgctgcgatgatttattttattttttatctcttgtagtgatggggtctaaccatgttgcccaggctggtctcaaattcctaggctcaagcgatcctcccgcttcggcctcccaaaaggcacagacacaagccaccgtgcccggccctgtgatgttcatggaactgacttgtcccacgtctgtctccttctccttcctacctctgtgtgaccgggccctcgagctgtgctggacacacagaaggtgctggtgcatggaaggtggaggtcagaagggcctcccttcccccgcgagaagggcaggtcctaccacagcatgggtgggcgcctgggatgtggaaggaagctgaactgcttctagtccaggcttctcaggctgcattcacaggccagagctttttttttttttttttttttgagacagagtctctacctgtctcgcccaggctggagtgcaatggcgcagtcttggctcactgcagcctccgcttcctgggttcaagcgattctcctatctcagcttcccgagtagctgagactacaggcatgtgccaccacgctcggctaattttgtatttttagtagagacggggtttcaccatgttggccaggctggtctcgaactccggacctcaggtgatccactggccttggcctctaaagtgccgagattacaggtgtgaggcaccgcacccagccctcccgcagttctgattggataacccagcccaggagtgccccggagccctccctctggccgtatgctgagctcagtgcctcacccccaccattttagtccccacccatccctgcagggtcagtcctactgtccccactgcacagatggggaaactgaggctcagaggggttggggaaatttgcccacagtttcagccaacaaaatggagaacaggatccagtccggccccaggccctgctctgctgacctctgttttatcttcccacccgggacccagaggatggggtgctcctcaggactcgccacagagcccgaccggaggactgggaatgtgcccacagctgggacaaggaaccagccagcagcattcctggcaggcccatcccagccaggtgaggccccagctcctcttggcttctcccactgtgggtacggggacgtgacagcaaatagactgtccaatttccctgccctcgcggagtaagatggagaggaacgttctggagcagacagtgatggctgcttctgggagacacagcagggaagcggtgagccatgcagagagtcgggggattggcgtcggcctctcccctacatgctcctgcccgccccaaagccctcagtgtctcagtgctagtctggactttccctcccttcctgggactcagggagggattcttttgcctgctggccacagcgggaagcagcagatgctgcccgggccggcctgtggggacggcaccctgcctctggaaggctcggtgatgctgcggccagccggtgtccaccaggcctgtgccaggtgagatgggccttcacggtggcctggctccgtggaccaggcccccggatgcatccctcccccagcaggcagtggattggagaggagccctaggagcacgagggaccccaactggggggacttcagaggtgcctgcctgggagggggcaggtgcaagaaagatacttccaggaccccgagggaggagacagccccggacttcgaggctcatggccagaaggctgggagctccctgaaggcaagcacagggaacccagaagacagcagcaggcaggggccatggatgggggccttggggccaaccacccggtgaaggcttgatggaaggagggagggagccaccgacggtccttgagggtccttggatgcctgcttatggaggagtagcctgacactgagaagtgagggggcatccaggtcccaggtctgggtgagccaggtgatctggtttggctctgtgtccccacccaaatctcatcttgaattgtaatccccacatgtggagggagggaggtgattggatcatggaggcagcttccccagtgctgttctcgtgatagtgagtgggttctcacgaggtctgatggttttataaggggctcttctcccttcctattccttctctttctctcctgctgccttgcgaagaaggcgtctgcttccccttctgccgtgagtgtaagtttcctgaggtctccccagccatgtggaactgtgagtcaattaaacctccctggctgataaattacctagtctcgggtagtatctttatggcagtgtggaaatggactaatacagcaggtgatctgggaatggaggggaaatacttctgggaatgtcactgatctaaaacctgtctgtagtggggttggatgacgagccacgctggtgaaccgatttcctgatcctcagggattcctgcaggggtggcccaggttcctgctctaggacatggggatgtatgggcccgcttgtctggttccagcctttggggcctgctgagatttgctggggccgcaggaagaggagcagttggcttcttgcttgagaacttttcaagaacattttcagggtgtagatgagtgaaggacccacatgctgctgtgctcctagtttatgaactactgatctttgctgactctatggagagagcaatggatggaagggatggaaggccctttgcttttgaaagcaaaatagagaacatctgagctatgcaagaagagcaaggacagggacctattgtaattctgtgcacggccccctcttgacattctccactcctgtggaatttggttttacgaccacaggactaagctaattaggacttagctgaggagatgggccgtgtttccctgtgctcagatggtgacggtgttgtgcaccttctcttgccacaagatccagagtcaatgaagacaggactccagagtgtttgcacagaagccgggtcttccagccaaagtggattctgtgtgattacaagtttgctagtaatgccaccctggtttatttattttaatttattttatttttttaaacagcaaaaccaaaatgaagcaattgaattgggtttcacaataatgaaggaaaagccttgtgtctattttgtttgtttgtttgtttgagacggagtttcgctcttgttgcccaggctggagtgcagtggcgccatctcggctcactgcaacctccgcctcccaggttcaagcgattattctcctgcctcagcctcccgagtagctgggattacaggcactggccacaatgcccggctaatttttttggtatttttaatagagatgggttttcaccatgttggccaggctggtctcgaactcctgacctcaggtgatccgcccacctcagcctcccaaagtgctgggattacaggtgtgagccaccacgcccagcccttgtgtctgttttttaattaaaattttgatggagataattgtagatccacatgcaattgcaagaaatcacactgagaaattcctttgaccctttactcattttccgccaatggcaacatcttgcaaaattataattcgctaccacaaccaggctatcaatgttgggacaatccaccagtcttattatttatttatttattgagacagagtatcactctgttgcccaggctggagtgcagtgacgtgatctcagctcactgcaacctccgctttccaggttcaagtgattctcctgcttcagccacccgagtagctgggattacaagtgtgcagcaccacgcccagccaatttttgtatttttagtagagaccggggtttcgccatgttggccaggctggtctcgaactcctgacctcaagtgatccacctgccttggcctcccaaagtgctgggattacaggcatgagccactgtgcccagtcccaatttttttttgatgcctgctccttctgaggcaggtgtactgatttttatgtggacgtaaactttcgtttttccaggcagtacaatagccgccgtgtcatgtggtagttagttgcgtgttttgtttgataagaaactgctgtcctggcgcagtggctcacgcttgtaatcccagcactttgggaggccaaggcaggagggtcacatgagctcaggagtttgagaccagcctgggcaacatggtgaaatcccatctttactaaaaatacagaaaattagtcaggcatggtggcatgtgcctgtggtcccggctacttaggaggctgaggtgggaggatcacttgagcccaggaggtcaaggttgcaataagccgacatcacaccactgcaccccagcctgggtaacaaagtgggatcccgtctcaaaaaaagaaaagaaactgccagactgttttccagagtaactgtactgttcccgccagcagtgtgtgcgtgatcttatttctctgcatcctcattagcatttggtgttgccaccattttttgtttcagccgttctgatagttaacgcagtgatatcttattgtagtcgtaatgtgaatttccctaatggctcacgatattgaacgtcttttcacgtgcttatttgccatccgtatatcctttttggtaaaatatttcatatctcttgcccatgttctaattacattctttgatgcttttctgttgaattacactgagggaggtaagggaaccagccaagcagattccctggagaagaacattccagaaagagagaagagctaatttaaaggccatgagacaggagttcagggtgttcaagataaagcaccagagtcagtgtagccgggcgagtgagctgcgggagagggaggcacattcaccaaataattcatggccacccccataaccggccccgctacagacaggcggcaccgcgcagttggcccaggcccccacgacgggaaggaacgtgggccactcctgggcagaggcatgaggaacaggtgagcgatgcctggcctgccttctgcttcttgatgatggctggaggccacgcattgagtttgttgaaacaagattgtggcagcctggatgggtgagtcaccgcgtggagccgctgctgctctggggagctgcctggctcgctctggacttagcgtgagcgagaagtaaatctgtagtgtatcgtgtcttggagacatcagggcttatttgtcaccactgcaaaaatgagttcattctgacaaatacagggatgaggtcagcaaaatgagttcattctgacaaatacagggatgaggtcagcaaaaatgagttcattctgacaaatagagggatgaggtcagcaaaaatgagttcattctgacaaatacagggatgaggtcagcgggacttggcgggtgtggggggccggtcaggtcctgcaaggccttatgggtcttggtaaggacaccagctttttggcttgagttctgagtgagatgggaaacagctgccttttctcatttgactttgacttcctcccctcaaccccacctgctgcaatgaaagtcgtaatatttatgaggtcaaaggtattctctttctcagtagcctctgggttttgtatcagcttggaaacgacttttgcatgtttaattctcctcctacctttttttctcgtactttcatggctttttaaaattttatttttattttgtttagaggcagagtctcactcaaggctggagtgcagtggtgccatctcggctcactgcaaccttcccctccgagttcaagtgattgtcgtgcctcagcctcccaagtagctgggattacaggcacgtgccatgatgcccagctaatttttgtatctttagtagagacagggtttcactgcgttggccaggctggtctcgaactcaagtgatcctcctgcctcggcctcccaaagtgctgggattacaggcgtgagccaccgcacccggccttcatggctttatttttttacactgaaatctctgatgcatctggtgggttttgtgtaaggagtgaggtcgagcttttaatgagtcctaaatggtcctctagattcagtgtctgcatgacaaagcttatggccagctctttgaaactctggagaaaccctttagggaactgatgctgggtctagggtgggaagggcatcggggtggtgagaggagccccagcagatcaccagggagggccagggccggctgggtggctgcctgggacaattagacaattatgaggagtgtggtggccaggcgtggtggctcatgcccgtaatcccagtactctgggaggccaaagcgggtgcatcacctgaggttaggagttcgaggccagcctggccaacatggtgaaaactcctctctacaaaaaattagctgggtgtggtgatgggcacctgtaatctcagctacttgggaggctgagacaggagaatcactcgaacctgggaggcggaggttgcagtgagcggagatcacaccattgcactcaagcctgggcaacaagcgcgaaactgtctccaaaagaaaaaaaaaaggagtgtggaaataacccaggaataaaaaaaacacagtgctaacatcacattgtgtagccccagcgtgaaggggtttttggccaccacagggagcagaatgtcctttggtggacatgacaagagtcttttctgaggcaccctgtctgcggcacagctgcctgggtgcccgaggaacagccctgtgtcagcatttagtccgctgaaacatgcagctaaataaccagccggctgtcttccgagaacaagtgatttatttttattgcttcatttttaaacacttcaacatgcctcccaagaagctgtgtggtttggaaaagcgtaagagaaagctgaagagaaaatgcaagctggagaaaagtggggatgctttgctgacacattcttccggaaaccagctcggctctgccaggcgtgtgtttttggccagtgccatttccgggcccctggagttgatggacatttcctgtgcggggtctgattcccactacagatttgaaagaggcatgcagatttttattttaaaaaaaactaaatagaacctggtagccagacatggtggcgcgagcctgcagtctcagctacttatgagactgaggtggaagaatcgcttgagcccaggatgtggaggttgtagcgagccaagattgcagcactgcactccagcctaggtgacagaacaagagaccctctctcaaaaaacaaacaggctgggcatggtggctcatgcccataatcccagcagtttgggagactgagacaggtgcatcacctgaggtcaggaattcgagaccagcctggccaacatggcgaaaccccctctactaaaaatacaaaaattagccaggcgtggtggcaggcgcctgtaatcccagctgctcaggaggctgaggcaggagaattgattgaacctgggaggcggaggttgcagtgagccgagattgtgccactgcactccagcctgggtgacaagaccgaaactgcgtctcaagaaaaaaacaaaaaacaaaacaaaagcccaaaacaaaaaacccaaaataaaaaaaacaaactaaagaatattggtttttctgtctctcaaaatatgtagtgaacatctctcaatctaaggggcattgtagtgttagccagctgaggtaaaaaggcaagacccattcgtctccaagtgtcctagctggggctcttaaagaaccagcaaggccaggtgcagtggctcatgcctgtaatcacagcactttggaaggccaaggtgggaggatcatttgagcccaggagttcaagaccaacctgggcaacatagggagactttgtcgctaccaaaaaaatacaaaaaaattagccggccatggtggcatatgcctgtagtcccagctatttgggaggctgaggtgggaggattgcttgagcctgggaggtcaaggctgcagggagctgtgatggcaccactgcactccagagagagaccctgtgtcaaaaaagaaagaaagaaggaaggaaaatgaaggaaggaaaaaaaaggaaggaaagaaaggagagagaaagaaaagagagagaaagaaaacagaagagaaaagaggctgggtgcagtggctcatgcctgtaatcccagcactttgggaggctgatgcgggcggatcacctgaggtcaggagttcaagaccagcctggccaacgtggcgaaaccccatctgtactaaaaatacaaaaattagctaggcatggtggcaggcgcctataatcctagctactagggaggctgaggcagaattgcttgaacccaggaggcagaggttgcagtgagccaagatcacaccactgcattccagcctgggtgacagagcaagactacgtctcaaaaaaaaaaaaaaaaaaaaaaaaaggaaaagaaagaaagagactgatttagtgatttagtttggctctatgttcccacccaagtctcatctccaattgtgatccccataattcccatgtgttgaaggggggacctggtgggaggtgattgggtcatggcagcggttcccctataccgttcccgagatagtgagtgagttctcagatgatctgatggttttataagggcctcttcctccttcgctcattcactctctcttgcctgctgccatgtaagacatgcctttgcttctctcttgctttctgccatgattgtaagtctcatgaggcctccccagccatgtggaactgtgagtcaattaaacctctttcctttataaattacccagtgtcaggtatttctttagagcagtgtgagaacggactcatacagaaaccaaaaagaaggcagaatggaggaaagacagcaggtccaggacttggtcaccttgatgccccagtgtgaccttttgtcccactgagttcccagcgctggctgtcacatgctcagggctcagccatctgctcctcatgcaatctccagtgtttgcagagcaggaggatgtttccaaggaaatcctactggaatatcaccagagttccctggaaggcatcagggacagtggtgagcttggcagtgagccttctccacctccctagttcaggtcctgcccaccgagagttagggacggtcttggtgctgttgggccgtcctgaccaccgtggcagccagcaatgggctgggtttgtctatggcaggtttctcagcaggcacggctgacatgctgtgcagggtcattctctgcggggggagccgtcctgtgtgcactctaggatgtttagcagcgtctctggcctctacccaccagatgccactagcacccacccagctgtgacaaccaacaatgtctccagacactgtttttttttttttgttttttcaagacggagtcttgctctgtcacccgggcagaagtgcagtggtatgatctcagctcactgcaacctccacctcctgggttgggttcaagcgattctcctgcctcagcctcccgagtagctgtgattacaggcacccaccaccacgcctggctaatttttaaatttttagtagagaaagggtttcaccatgttggccaggctggtctcgaactcctgatctcaagtgatcctcccaactcggcctcccaaagtgctaggattgcaggtgtgagccaccgtgtccagccagacactgtttaatgttccccatgtgggcaaaactgcccctagctgagaatcattgatctaaactagcacttttatgactgagaggatgaaactgaggcccggaaaggttaagacacttgactgaagtcacacagtgagcccctgggatggagctggggctgggcccctagcacaagctcccagattggggctccatcttcggaaatggggcagcaggtgtggtgtgcgtgattctgatgaaagatgagactggaatccacctaaggttgaaatctcccacagacgaccctgagatcacaatgctcagacaggacagacattaatctccttggtggtacaaagagccaaggtgattcaattccaggcccctgcagaagctttttccaagggcttggcaggtgtagacactcttccaccagatcctgccctcgttagcataatctgagcagcttctcctaagatggaaggtccacgccctgatggggcagagaacacaggcttccagatcaggaactgggactctggggccagatggcaaagggttcacttctgaataatgccagcatccatcctatttctctcgcttagctttatggtggtgtcttcattgtcaatataaaaaacacttcaggccaggcgcggtggctcacgcctgtaatcccagcactttgggaggttgaggcgggcggatcatgaggtcaggagatcgagaccatcctggctaacccggtgaaaccccgtctctactaaaaatagaaaaaattagccaggcgcagtggtgggtgcctgtagtcccagctactcgggaggctgaggcaggagaatgtcctgaacccgggaggcggagtttgcagtgagccgagatagcgccactgcactccagcctgggcgacagagcgagactccatctcaaaaaaaaaaaaacaaaacacttcaggccgggcatggtggctcatgcctgtaatcccaaacctttgggaggtcaaggcaggtggatcacgaggtcaggagttcaagaccagcctggccaatatggtgaaaccccgtctctactaaaaatacaaaaattagctggacatggtggcatgcacctgtagtcccagctactcaagaagcggaggcagaagaattgcttgaacctgggaggctgaggctgcagtgagctgaaatagcaccactgcactccagcctgggcgatacagcaagactccatctcaaaaaaaaaaaaaagagcacttccactccaccccctggtgcataccatgttgctctcatgaggcaggcagaccgcagtttgttcaataaacacctttccggtgcgtgaactcatattttaaaatgtgttctgggaaaaggctgttgaaagaacccccagtaagaattcttctccaatgccagatttctcttgtgatcgcttcctgattttctgtttaatacgtgaaattacacatggtgaggaattttctttttttttttttttttttttttttttttttttttttttgagacggagtctcgctctgttgcccaggccggactgcggactgcaatggcgcaatctcggctcactgcaagctccgcttcctgggttcacgccattctcctgcctcagcctcccgagtagctgggactacaggcgcccgccaccgcgcccggctaattttttgtatttttagtagagacggggtttcaccttgttagccaggatggtctcgatctcctgacctcgtgatccacccgcctcggcctcccaaagtgctgggattacaggcgtgagccaccgcgcccggcctggtgaggaattttctgaaagcacacacgtatttaagagttctggagagaagcagtgtgtgtgcactgggggatccgacataccctaaggattgagtttgtctgtactaggacaggatccatgaattcatgcatgcattcaattttagaatcctagagttagtggctctggcacaaaacaaggagattggagagcactgggcagcagaggctctactcccaggccgggctcaccagcctccccggggggcaggcatgcaacagagcccatgggagtttcggtttttttttttttttgagctggagtctagctctgtcgcccaggctggagtgcagcggcatgatctcagctcactgcaacctccgcctcctgaattcaagtggttctcctgcctcagcctcccaattccagcctccctcagctggaattacaggtgtgcaccaccatgcctggctaatttttgtatttttgtagagatggggtttcaccgtgttgcccaggctggtcttgaactcctgggctcaagcaaccctcctgccttggcctcccaaagtgctgggattaccagtgtgaacctctgcaccacgcctgcatactgtcattttaaaagtcagatcatctcttccatgaggaagggagtagaacatggagcctcaactgtgcgcatgataagaatccgtgcttccccctggggaaatatcaggccttatgggcttaagtgctcaagcaagagggacttcagcttagacgaaagcatgagcctcagttttgcattttcctaaggagcgtcatctgcgcctctaggagtttttactatctgagcctccgggttcttctccagccgctgctgagggcatgaagccatctgggggtggggggcgcaggtgtggaaggaagaagcatatccagtcccttggacgtggcagactcccagtgtgtgtggcggcgcccgcaggaggcagtccctctcagccgcatccgccttgaggttgttctcagttctgatgtggccccaaagagaaccagttccattatggattagtaagaatttattttgaacatgttgtgggaagatggtgactgcagggggtgcggcggggggagggagcccattagaggcaccaggttcccctccagcgagcccccctggacgttgcttctccctgacccagcaccttggtagaccccctttgttggcctgtccaccctgctcagcaaacccaaacccgagggtcagccgagcagtacccccaccccggcgttcccaagcgggcccggcgtggggtgactcagcttgttccactccatctgttagaaaaggcacaggactgtccaaggctgaagcggggtgggattttaggggcccctccatgcaaacaaacataaatcaacttccgtcctgccaaaagctctgctgataattgagaggcaagctaatgaacacagcagtttaaaattcactctccaatatctattgcagaattgcattggatagttaaaaatcaaagagtctagccccctagacccggcctgcttcctggggaggctgcccccgagttaggatttcacatgacacctccagcacttctaaagggccaaccccagaatcgctcactccccagcacgtctgggctgtgcgcggcaccccaggtaaatgcagcggcctctgcattagcccgcgctgcttagagacgctgccacgacacttctgcccttgagtccggttttggggatggttgatgtggggacacatgagcgagtgtggctccttttgtggactagactgctctgcacgctgtggggtgccagcctgggaggaccctttggccaccatcaccagaaagccttcagcccaaagacctttctcaggcgtttacagtttatccacacttttcctaacaagactccaacacttccagtctcttgggaactaattgggagggcaagtaaacacctcttcaacagaaatggctcaggggggcctgttgtacacccccctgtgtcccaacaaacctctgccagcctcaaacaactggacaaaatcctcctgagggcaccagaagtgagctggggtggctggcgccgcctggtagggcacagggctggtctgcagggtcatgtgattggaggaacagcttgaactaggttgcctggcaggtggacaggcacctaaccccgcagcaggtgccataagcgatgaagtgggtggaggtcttggggagcggtagtgctgttccaggagctcactgggctccataccggcagcttccccacggttccagagtcctccgggctgctcggagcctgggcacctccctgtgccatttcagggccatttccctgtgtctctccccctcgcagcacttgccgtggggcgcgtgaaccatggctactgagtgaacgcaagagcgtcgagggcttttgtcctctgacaagtgcacactcccccaggcacccacgtggaatttcaaacccagtcacttcttccggaagacccataaatcgctccttattgttgtgtgactgtaaatgtgttctaaacattgtcctttcacgcctgcgtcctcccctgtgtgcacactttattaaacgttgaaaacaactctttattatggaaaatctcaacctccggagagtgcagacagcagccttatgaacgcctccggatccagcctctatatttaacaatcgctaacattttgccatatttgcttcatctggttttcttttctaaactaatctaaagtcagttactgtctctgtgacatttccccctaaatcttttttagacattttcttttaaaaatgacattttcttttactgaaccacaataccatgatcacagctaacaaaattaaccctgattttctaatatcatggcctgcccagtccatgtttgtttggttgtctcccaaatggcttttccagctgggtttgttcaaaacaggatcccaggctgggcgcggtggcttatgcctgtaatcccggcactttgggaggctgaagtgggcggattatctgaggtcaggagttcgagaccagtctcaccaatgtagtgaaatcccacctctactaaaagcacaaaaaaaaattagccgggcctggtggagcatgcctgtaatcccagctacttgggaggctgagacaggagaatcacttgaacctgggaagaggaggttgaagtgagctgagatcatgccactgcactccagcctgggcgacagagcaagactctgtcttaaaaaataaaaataaacaaacaaaacccaggatcctgataaggtgcatgcgttgcatttggtggtttcatctcttagtcacctttaacctgctgcctcctttgttttttttttcttttaatttttttttgagacggagtctcattctgttgcccaggctggagtgcagtggcacaacctcagctcactgcagcctccacctcccaggttcaaacgattctcctgcctcagcctcctgagtggctgggattacaggtgcctggcaccacgtgcggctaatttttgtatttttagtagagacgaggttttgccatgttggccaggctggtctcgaactcctgacctcaggtgatctgcccgcctcagcctcccaaagtgctgagattacagatgtgagccaccgcatccggccatcctgtgttttcatgtctgactgtggaagagactgggttggcgggctgtggacttgcaaggcatccattcagggtcagcctggctgcttcctctggctgtggtatacatacgctgttgcttgttgtggcctatgaagttgaagttagagctaaactaggtctgataagattcaggttgtgctttcaggccagagggtcttataggtcatcagaagcacattatgggccagatgtggtgactcacacctgtaatcccagcactttggaagcccgaggcaggaggaccgcttaagcctaggagttctgagaccagcctgggcaatacagtaagatcctgttgctacaaaaattttttaaaaagtggctaggtgtgttggcatgtgcctgtaatcccagctacttgggaggcagaggtgggagaatctcctgagctcaggaggttgaggctgcagtgagctgtgattgcaccactgcactcagcctgggcgacagagtgagactctgtctccaaaaaaaaatgaaggcacatcatgactctcgggattctgaggttggtccctggttttgaggtgagagctggtcctctccattgttagagctacctcttccctattggaggcaccaagtaaacccgggaggacacattggcacagggtgagcgccgagctccctgccagcctgtcaccaatatcccctcaccccaaaacaatccatggcaacacatggctgggcttccacagtctctccctgcacactcatcacaccaggggctgaaccccatgtgggctcagggcagtcaccccactacataataaacgttcctccagcattcaaagcatttcttaatggaaggaggtccccagatgcatttacagccttggttccaaacctcagggccgcctgtgtgtagtattctataaaactggttccttaagaatccactttgaaggccggatgcggtggttcaaccctgtgatcccagcactttgggaggctgaggtggtcggattgcttgaggccaggagttcgagaccagcctgggcaacacagtgagaccttgtctctacaaaaaataataataatcataactaaaaataaattacttttgaaaaatccccatagtgaggttagtatgaaacaaacaaacaaaaaaaagaatccactttgaaaccctgtggcctactggggttttgacatgattggagcagtgaggcatggagggtgggctgggctggggggctcagccaggagcgtggagcagagtgataagaatcagagcagggtgatagaggggacggggaggggagggcagaggtgatcaacattgtagaagacaggagggtggagagaaaaagagagggagcagagggagttggggaaaggagaggggatgtggttagagctttgggaaggaaatgtggagggcccagccagactctgagagtccgtgtaggcgcgggacaggtgtcacagttcatctctgcaaaggtcgggtgcatggtgaggaggtgacgtgactgagagacagcacagtgcccggaagagagaagggtttcaagtcattttggcaggacacggcggcacgcacagcccgcccagacctagacccctcgctctcctccacagagccccagggagcagctgtgggcttccctgtggccgagaccagcctttggcctggtgtgtgtgtgtgtgtgcatatgtttatatgagtatgtatgtcagtatgtgtatgagcatgtgtaaatatatatgtgtatatctgtgtacacattgtgtgcacacatgtgtatgtgtatatgtgtgcatgtatgtgtccacgtgtatgtgcatgtatgtgtacatatgtgtgtatggatgtgtgcatatgagcatgtgtctgtgtctgtatgcccatgtgtatgtgcatgtatgtgtacatgtgtgtatgaatgtgtgcatatgagcatgcgtatgtgtgtgtgcgtgtttacgtgtatgtgtgcatatgagcatgtgtatgtctatgcaagtgcgtatgtgtccacgtgtgtatgtgtacatatgtgtatatgtgtgcatgagcatgtctgtgcatgtctatatacatgtatatgaacgtgtgcatataagcaggtgtatgtgtgtgcatgtgtgtttatatgtgtatgtgtgcatatgagcattgtatatgtatgtgtgtgcatgtgtgtttatatgtgcatatgaatgtgtgcattgagcgtgtatgtgcgtgtgtctgtgcatgtgtttatgtgtatatgaatgtgtgcatatgagcgtgtgtgtatgtgtttatatgtgtatatgtgtgcatatgagcattgtatatgtatgtgtgtgcatgtatgtgtgcatgtgtttatatgtgcatatgaatgtgtgcattgagcgtgtgtgtatgtgcgtgtatgtgcatgtgtgtttatatgtgtatatgaatgtgtgcatatgagcgtgtgtttgcatgtatgtctatgcatgtgtgttcatatatgtgtgtatgaatgtgtgcatatgagcatgtgaatgtgtgtccctatgcacatgtgtatatgtttgtatgtgtgtttgtggcatgtggctctggggacacagggctataggtggtcccatgactcttctccatctcatccccgtgacagctgcccctaccaagtcctgtgctccctcttacctcttccctgggatgacagtggtcactttccccatgttttggatggggcctgcttgtccccaacgtcctttagcacgaaggggacaggtgtcctattcctgtgaatggccggttaccttccaggtgcgttagagtggctcctctaaccagccctgcagggatcttattagatcttattagagtggctcctctaaccacccctgcaggggggaagtgaggagccgcagggctgtggaggggtccaggtgtcacggccaggacttgtacccgagcccgacacgggcggacccaggtgtgcggggatccagcccaggtgtgccggtggcggccgcccccacggaaccacctggcccgctcggggacccaggtgtgctgagaagggggtactggcgttggcccggcgtgaaaggtcaccctgcacccccgcacccaggtgaggcgggcgcgggatcccggttgccacaggcatcggagcggccgggagcgggggcagggggaggcaatgagaactcccggggagggggctcgcaggggccgcatcggacgcctgggccggcggggcagagggaggcgccctgctctccggtccctccctttgcctccctcccgccccgggcgccgcctgcgggagccgactcgttccaggggaggcagcgccacctgctggagtgtgcgcgtctgcgcaccgggccgggttccgcaggtcctggggctgcgcccgagacccccgaccgagtcttcggcgcctccagcgcttccccggcgtcttgggctgcgaggggccctttccgcagggcgatgttttagcagttctgggaggaagggcccactgccgttgccctctgaggaccgaggccgagagcctggagggcgtggagaagggtctgaccgccggctctggtcctcgggctcttggcgacagcgacctccctcctcctccgggcgatggtgacgggcgctctcagagtggcggccacactaggcgcagggccgtcttccaagtgtgtggtcctctcagacctatggagttggtgctgttctggctccctcttaaagagcgggaaactgagacacagagaagtcccaccgccgggggtcggggtggggagggcctgggattggaacccaggcatgctggcttgtgtcacctgtggttctctctgcctgaagattttttcacctgcctaactcatgagctgctacttaccctttgggtagcattagatgtcgcctcctccaggaagccctccctccccctccatgtgagggtgggcgctcctgctatatgtgggcctaccggccctctgcgggctggatcatcacagtctgttcacttgtctgcctcctaccccttgacgtgggctcccaaggatcatttgtgtctgtcttgttcacctgccctttgtagtgaaccaaacctttaagtgcacattttaaaattgatttccaagggggctgagagctatggaggaagagccaggtcagagagtcatcagaagcccatattttacaggatgtggctgggggcccctctggggtgcccctccaaggaagatgctgagctggacctggagcaccgtggaggcaggaccatgtctgccatgctcagagatgggtgccaggggcgctggcttgtcactcaagactccccactccatctgccctcccccactctcccactaaccaggggggacccacctgcacctctggtcaccactcatgctccctggtgctgggcaccccagggacaggaagagggctgggtgttcctggctcctgcactgcttcccaggcctgatccccatctttctgcacctgcctcccacccatcagcttccgctagactggaagcctccagagggcaggtgctgcccctctttcccttgtgcctggattccgttggcatctaatcacagacgagggactgtgtccccttctccacctccgtggaaactgtgtctcactctctattccaggccgagctgtccatcctctgctggaagccttgtgccatcagccctcacctcccccttcaagcctagacattctctctcctggcgtaaatatgttaactcaaggttctttgctctaaaaccaaggagttgtctcctctcccaggtccacctcctctctctcgtgaactccctgcccctccacctcatccctcctccatgacctccccctactcaccatctgccccttctgccaacccagcgagctgcagctctccctggcatgtcactctctaaaccttctgtcccttggttacgagtgcagttctcgcctggatttcttcccggctctttgacttctccccaacccttctttttctgttttccccttaaatgtggacatccccacgtccaggacctggtctctggcccttctcctctgattcatctcagtggcgtttctcccaaatccccgattgcagccacagccacatgtcaattaggtcacctccatgtcccggctaagacgtgcctcctggcccctgatgcgccatctcccagatggaaatgccatcattgtatttttgctctgtccccaccaaaggcaacacaaagcatctccatctgttccttcatgttccctactcagtgaatgaccgcttatttacccactggcccaggctcagcttggatgtccccgggccgtcgtttccagatctcatcttcaaatcctggcgatcttcgcccaggagctgtggactcctcttctctgcctgccgcccctgccctgtccagcgtccacctctcccaaatggcccactgggtccctccctcctggcccccctgcatctaggagcagccctcctccaacagttggaagggtcttcccaaaacacagatgagaccttgtcatcttgaaactcttcattggctctgaattgtcttaggatcaagcccaaactccttcagagtctgggaaggggcccctcgttctgggtctggctctgtctcccagggtctcccccgccttgcctgctctgtctggccacactgacagtgccctgatgggccatgtcctcttcccctcagcgcctttgcgtgtcccagctttctgagcccagacagccctctccccattttggggggcccacctcacctatcagggtgcagcttctcctctgagaagacttctttgctccccaagcctggatttgatgccatctgcctgtattgacctggctaagccaacaccctagccctaggctaccctcaaccaacacccctgaccacactgtgtgtgaattacacccctgaccacactgtgtgtgaattacacccctgaccacactgtgtgtgaattacacccctgaccacactgtgtatgaattacacccctgaccacactgtgtgtgaattacacccctgaccacactgtgtgtgaattcctcctttccttgtttctgtgcccattcaagctgtaagcccctttggaagagactgggccttcacaattatcatctcagcaccaagcacagaacccacctcaataaatggttaatttgagacttctgtctctctctttttttttttttttgagacagagtttcgctcttatcccgcaggctggagtgcaatggtacggatctcggctcactgcaacctctgcctcccaggttcaagcgattcttctgcctcagccccccaagtagctgggattacaggcatgcaccaccacgcctgcctaattttttttttcttttttgagatggacctgactctgtcacccaggctggagtgcagcggcgcaatcctggctcactgcaacctccacctcccgggttcaagtgattctcctgcctcagcctcccaagtagctgggattacaggcgcccgccaccacacccagctaatttttgtatttttagtagagatggggtttcaccatgttggtcaggctggtctcaaactcctgacctcacgtgatccacccgcctcagccttccaaagtgctggaattacaggcgtgagccaccacgcccagacgagactgctctcttttaatttatatttatttatttattatttttagagtcagggcctcaccacattgctccggctggagtatggtggctacttacaggtgccagcacagcatacggcaacctcaaatgactggtctcaagcgatcctactgcctcagcctctcaagtagctgaaactagagatatctttattcttaatgtaagtatttagtgctataagtatccctctcggctgggcacagtggttcacacaggtaatcccagtactttaggaggctgaagcgggaagatcacttgaggccaggagttcaagactgagcaacctcaaaaccctgtttctagcaaaaaaagaaaaaaagcaagctaggtgtggggggcatgttcctgtagtcccagttcatcaggaggctgaggtgggaggattgcttgagcctgaggagtcgaggctgcagtgggctgtgatcacaccactacactccagcctgggcaacagagcaagactctgtctcaaaaaaataataaaaaataaaaataagaaaatttctttctcagcattgcctcagatgcatcccacatattttggtatgctgtcctttaattctcattcagttttatagatttcttaattttctttgagacttcctcattgacgtggatatttagaggtgtactgttcaatttccaagtgtttagagattttcctgtagtctttctgttactgattttttttttttttttttgaaacagagtctcactctgtcacccaggctgaagtgcagtggcaccatcacagctcaaccccaccccccatcagcagtcttggccccacaatccctaggctcaagcaattctcgtgcttcagcctcccaagtagttgggactacaggcatgtgccaccacacccggctattttttgtaactttagtagagtcggggtttcaccatgttggccaggctggtctcaaactcctgacctcaagtcatccacatcacttctggcctccgtagtttcagatgagataatttgaactggtgtccctataggtaatgtgttgtttctctggctgttctgaggagattttttgtctttagttttcagaagtttaatgatgatatctcagtgtagatttctttggcttcttctgtttgaagttcagtttcctgaatctgtaagcttatgtcttttaccagatttggaaagttttcagccattatttcttcaaatactccttcagcctcactctcttctcctccttagcccctatgatgtgagtgtcagatttgtttgttatggtcccattggatgtggacgttctgtttatttcttatccgtctattttctccctgtggttcagactgggtactttggattgatctgtccccagattcactgattctgtcgtctgtcatttccactctacaactgagcccatcagggagtttttaaaatttctgcaatgacatttttcagttctgtaatttccatttggttctttctaaatacccactatttctttgctgagaatttctatattttcatttgtttcaagagaatttgcaattgcttgttgaattttttatttttatgtgttttttttgatggttgctttaaaatcctggtcacatggctgggcgcagtggctcatgcctgtaattccagcactttgggaggccgaggagggtggatcacttgaggtcagcagttcgaggccagcctggctaacatagtgaaagcctgtctttattaaaaatacaaaaattagccgggtatgatggcacatgcctgtaatcccagctactcaggaggctgaggcaggagaatcgcttgaactcaggaagcagaggttgcagtgagctgagatcgcaccactgcactccagcctgtgtgacagagtaagactgtctccaaaaaaaaaaaaaaaagagtaaaatcctgggcacgtaactccaacgtctgattcatctcagggttcagttgacggtcttcccactcacattgtgattttcgtagttcttggtgggatgagtgaatttcaccatatcctggacattgtggctattaggtgaggagacttcaggtcctgtttgcattttttactttggtagcagcggccctgcttaggtttagcacccaggtcttgggctacttttgggggctgtggttccaatgaaaatctgatttgcagagcctctgccgtgctatagaggtcagctcggcttgtgtggtgctgcttaaggaggcagaaggagctttcccaggctggacattcattgcctccaggtgggagaagggagtctcccgctcacagggacagacaggccttctgcttgtggtgggctttctccctgccatcaacgtctccccctctctctgctgtgccatgattttgggtgggggagtggaatttcaggtccagtgaggaggaaagggttaaccctggccaataattagcaggagggtgctgggccaacccctttggtggttctgcctggcttgcttggtgggttttttgttgttcatttttttttttttttttttgagtttgtcgcccagcctggagtgcaatggcgcaaccttggctcattgcaacctctgcctcccaggttcaagcgattctcctgcctcagcctcctgagtagctgggaccacaggcacccaccaccacgcccggctaatttttgtatttttagtagaggcggggtttcaccatgttggccaggctggtctcaaactcctgacttcgggtgatccacccgcctcagcctcccaaagtgctgggatcacaggtgtgagccactgtgcccagctttttttttttttttttttacaggtcttactctgttgcccacgctggagtacagtggtgcgatcataactcactgcagccttgatctcctgggctcaagtgatcctcccacctcagcctcctgagtagctgggactgtacgcagctgccactatgcccggctaatttttaagttttctttgtagagacagggtctgctgggttacccaggctggtatcaaatccctggtctcaagagatcctcctgtcttgaagcgctgggattacagctgtgagcaatcgggcccagccttgcctagtgtgttggggcgacttgcctttaatctaggagagaaaggagcctacttggctgccttctgttgctaggtcgggagttgggaaatgcacgcctgggcgggtcctgtattgggtgggggtgaggggtgtcataatgccctgttgataaatattcctgacccagccttggggtcctttaccagctctcctgctccttccacctcagggccctcttagggttgcctcttacattctttccagggcttagcagacaggaacagggagggtcgggtttaggccatcttacccagaccggaagtctctaagtgtttgattgagtgtttgtttgaagaaagtgatgaacccaggacctcgagccaggaagatttttcccggtgaaaagcagagggattgactcacgctcggttctgagttccaggcctgactccagggctcaccagcttcttccacaacccgcacaacttgaacgcttggtagcatctccacgcagcagtgggcaccctggcttctggaggagcccaggctgcatttacccctccatggtgcatctcataggatcaactggacccgcgaaaggcactggctgcggaaaagcagccaactgctccccagcgaaggggatggccggaagcgaggagagggagaagccccagcagagaccccaggaggaaaagaccccacaacggggccactgggaacccatgatgttggttaccaatgtgattggaggttcggaacgacggacgtgtggccctgaagtgggaaacagaaaagctgaagggcgagacctgggagggagccccccacccccgcggactccagagacccaaccttccttccctgcgctccggccggacgttctccctgcccctgtggccgagcctggtaagttcgcagcaaacaggagtttggggctttacaagcctccagaggggtccatgggcatttgggtagattgttatactgcccctggcaggagggcaaggcccttcatgggagccataagctggagacctaacagagctcgcagctcggccacagggctctgttccaggggcattggccactggcttccagtacctgttcagcctcccagctccttgttgcctggaatctccaccactgatcagcgtgtaaacacctatgtgggggacacgggggcaggggggtccaggaaggcaacttttgggggatagggtgggaagaaagagggacctcagaggccagttcttccccatcctactctatttcctcctgtaaccatgggaaatgtctttctgtgcccgatcctgtatggggtgcggatggggcacacagatgaatcagacccggccccctctttgtgccaattcataagcacttcatccacggctcagccctgtgaaagagctcctcgggcccaggaatgcaatacagtgagaacactttccggtcttgcctccaggtgacgattcagcacacaggaaggtggccctgcccagggccaagctctctctcagttggcacctggccaggtgagggggctgctccctgtcacagaataggaagctgaggcccgtggggcctcataggcacacagcatggggcggcagactgggcctcctgaccgtcagcgctgtgaggccgatcttcttgcccactgcggaggctcagcccctcccctgccctccaggcctgtcctgcaaccactccacctctgctgctggggcctgtgtgtgtcccccagctcctcctgctggggcctgtctgtggctcctggaaggtgtgacccgggtcacctgtgggcagaggcctcactcacacccccggcctctcatgttgccatccagctctgtcctgctctccctcccccagtgggggtttaagctcctcgtgggctgcctccccgaccccggcgccctctgtctccacggaagcctgtcatttccgaggcctgagtcaccactggctggttgcagccgggtcagcgtgccacccggcacgaggcacagacatgagctactgggtcctgcaccctgtggttaggagctcagaggcctctttctaggggacgttgccagtgaataagtctttcagggcagaggcagggtggagaagaaccactcctctattcccttaccctcccacaccaggaatcgctgggctccctgtgaccagggactttcccagatgcctgggattttggatgaagctggaaagcagagaatgcccatgtgcctactcagtgcagacagggtgcccgacgtgcctactcagtgcagacacggtgcccgacgtgcctactcagtgcagacacggtgcccgacgtgcctactcagtgcagacagggtgcccgacgtgcctgctcagtgcagacagggtgcccgacgtgcctgctcagtgcagacagggtgcccgacgtgcctgctcagtgcagacagggtgcccgacgtgcctgctcagtgcagacagggtgcccgacgtgtctgctcagtgcagacagggtgcctgacgtgtcaatgttggacatctcaaaaggtggcatacggtcccagcagagagctgcagtggggttacgggcacagaccgggaagcatgctgctgccaggaactgaatttgggctcccctgcagagaagctgtgagacctcaagcaggggacttaagctctctgtgcttctgtttcctcatctgtgaaatgggtgctagaggaactgtgatgaggtgtcagtgaatctgcagcataaagcccagagccaaagccacttgcaaacgagggctcatatcagaggggcttgctggaggcaagttttgaggaatagagatgggactgtgaagggactcaagccaggatagggggccccccgagcacccctggcaaaggagcctctgctggtggttttctgaactcgagtcctggccccaggcagaagtggggagctttcttgggagggcttggccacctcggctggggctgggtgcagagaggcagcagccctgcccctggagccttctgaagggtggctggagctgcctgggcaggtcaccctccacatttccagcgtttcccagggaagggtgctcgaagttgccatgcaacaccaggagggtaggttcaggtgggaggctcatgaagggctcgctgcctggatggcactgaaccacaaggaccagcagctggggtgggtggggctgcctgggggaggggtgccctggaggatgtcctttgcaggggatgggagagaggaggcatgtatgagggtggaggggagcaaggaggtagaagggctgatccctactactgccccctgcagcttgccatcagatgtgagacggaagttttgacttagactggtttggttattttaatatgggacagcaagcctggattggccaagatgagatggttcatttgctgaagctagatgaacagctttgggaactgcctaagttgttaaccaaagtgatgaaggaggcccatagggtatgagggaaggccagaatggaatccatccccatcacctcctccatccccatcacctccccacttccttcatccccatcacctcctccatccccattacttcctccatcctcacctccttcatccccatcacttcctccatcctcatcacctccccatctccttcatccccatcacctcctccattcccatcatctcctccattttatcacctcccccatccccatcacctcctccatcctcatcacctcctccattcccatcatcgccttcattctatcacctcctccattcccatcacctccccacctccttcatctccatcacctcctccccatctccatcacctcctgtcacctcctccatcccatcatctccccacctcctccatccccatcacctccatcctcatcatctcctccattcccatcacctcctccattctatcacctcctccacctccacatcctgagccacttcccctcagcttcatttcctgaaacagcccctcctcaccctctccagcttcctttccttcaccttaccatgctcctttctggaaggcaccactccaaaccgtctccttggaaaagcaacttcagccccagtgcctgtccctgctacacccaacgttcctgtctggaaaagagttgctctttattcagcacgtgagttcctgacccccagataagggccagtgcagccggggagggaagcattagtgctgccgggtggaaggtggacggcgcctggatccagacccagcagtgctcatggggccaggcctggtgctcgttctttctcagtccttaacgccaccttgcaaggtggggattgtcctcccatctggccatgaagagctgaagcagagaggtgcagtcgctcatctgcgctcactggtcagtgggtcgctgcgtccccagaggcccctgggcagggtgggcgctgcgtccccagaggcccctgggcagggtggacgcctctgcaggtgcccgcacaggggctttctccttcacttggccacactcagcctttgatctgaaacaatgaaagcccctgagtcactggtccttcccgagcccgtgtgtggcccacagcaaggagctgcctgtcccaagttcggggggtttctttggcttacgcggatactgtatgtgagtgttggcagagcagcgtgagcctcggcctgcaaactcaggacggcaccaagccccatcgccttggtatcttccaggtggaccctcagcctgctgagtggacaggaaaccatctgtcatttagggttcctgctcccaactccccccaacagctgtcaccaccaccgtggttgtgcaaaggtcccaggcctttcagagtgggccctgatcactgtccatcctggccgggtctgctgaaacaaacatggtcacaatctcgtggtactttctgcctcgtggctctgtgtccacactggagagactaggacccaatcctggggcccctcccacaggcgccatatggctattcccctcagagacgcaccaggccagccccactgccctcaggaccaacctccaacttctcctcggcttgggatctccggtttctctctttgtcaaggcaccctgatatggttcggctctgttcccacccaaatctcatctcgatttgtatccccacgtgtcaagggagggacctgtaatccccatgtgtcgagggagggaggtgattggattatgggggcggttcccccatgctgttctcaggacggtgagtgagtgagttctcacgacatctggtggttttataagtgtttggcaagttccttcgctcactcttctctctcctgccaccttgtgaaggaggtatttgcttccccttcaccttccgccatgactgtaagtttcctgaggccttcccagccatgcaaaactgtgagtcaattaaacctctttcccggccgggcgtgatggctcatgcctgtaatcccagcactttgggaggccgaggcaggtggatcacttgaggtcaggagttcgagaccagcctggccaacatagaaaccccatctctactaaaaatacaaaaaattagctgagtgtggtggcgggcgcctgtaattccagctactcaggaggctgaggcaggagaatcactggaacccagaagacggaggttgcggtgagccaagatcatgccattgcactccagcctgggcaacaagagggaaactccatctcaaaataaataaataaataaaaataaaaacaaaagacccctttccattataaattacccagtctcagggaatttctttatagcagcatgagaatggactaagatacacccctccttcatccgccatgtgcagccggcgagcacagctcttctgaagagacaggaggtacccacgtctcacatcagcttctgccctgtgccctgcacaaaatccctgacatcttagaatacggcctgggaaaatatggagggtatgaataaatcagaatcttgagaatcatccccgtgcaggggccttctgcagccaggtggcccctgggggctatgggtgtcccctggagggagcaagggaatggtctgccttggggacagtaaggcagtgcagttatgggactgccaaggttggtctcttctagggctcttcggcctctggtgggttcccgtgtttgtaggggctgctcagagggaccatagctggggtagagcgagatgccccaggaacaatgatctccagctgtcgcagctgttaaatggacatttatgaaaacaaaccatcagcgccatcaggagccaggattgtcccttctttctattctgcaggagcgtgcatcacctgtgagctttggatcaccgagactgtgggtcctgacccattattcatgcatttgtagaatttcctgggggccacagaaactggcctgaggaccatacttgccaatcctcagtgcccagagaacgaggtgaacaagtaatcctgctccttttatctttttgagacggaatctcgctctatcacccaggctggagtgtggtagcatggtctcaccacaacctccgcctcccaggttcaagtgattctcctgcctcagcctcccgagtagctggtactacaggctcccgccaccacacccagcaaatttttgaatttttagtagagatggggtttcaccgtgttggccaggctggtctggaagtcctgacctcaagtaatctgcctgcctcggcctcccaaagtgctgggattacaggtgtgagccactgcacccggcctgtttcatctatattgttctttaccacactctcggtgacatcagccaactaacttattctctcttcaatgtatccagccaactacattctgtctgttggcttcttaatttcaataattacaccttttgcacacagaccacaacagggtgaaaaatgtaatatataaatactaaaatgtaaagctttttttttttttttttttttgagacagggtctcactctgtcacccaggctgaagtgcagtggtacaatcatagctcactacaacctcaaacttctgggatccaatgattctcctgcctcagcctcccaagtagctgagactacaggtatgcatcaaccacacccagctaattttaaatttttttttgtagagatgaggtctcactttgtcacccaggctgatctcaaactcctgggctcaagcaatctgcccaccttggcctcccaaagtgctgggaatacaggtgtaagccaccatgcctggcccatgaaaaacattttttaaaaagagaatataaaaaaattttagaaggaagaaaaaactaaaataaataaaaatcatacctttaacttccaggatttctcactgattatttttcgtgaccacctgttcttatttaagccagttttttttgttttttttgtgtttttttttagacagagtgtcactctgtcacccaggctggagtgcggtggcgtgatctcggctcactgcaacctctgcctcccaggttccagcagttctcctgcctcagcctcctgagtagctgggactacaggtgagcgccaccgcacctagctaattttttatatttttagtaaagacggggtttgcaccatattgaccgggctggtctcgaactcctgacctcgtgatttgcctgcctgggcctcccaaaatgctgggattataggcatgagccactgcgcctggccttaagccagttttggttttacaacttcttgttttctttgatgatcctaaacattttaatttgaaatcattttcagattcttccgttatttccatttcacctgcaatgatttaagggttgatttttcttaattgtctttattagcagcagctttgccatgtggttggggtgaggtgtgtaggtttgtcttgggtaaatgcctctctcatttcagtcaatctctgtctctctttcttcctcttcctcttcctctctctttctcctcttttttgctctctctccccgcaccttctctcccccactctctcccccaaatggtgaggtcgtgtgttgttggctcagagttcccacctcccgggggctactggggattttgctgtccgggtgctgagtccctgggtgccagggctctgaggccatggctgctttctcccctctccaggtacacagctgggaagccctgtccccacccctatgagtggctccagtgccctgcctcatttttagtatctgttacatggagatggttatcttactttttaaaaaattatggctatatcttttaattttttctttttaaagtttatctgtctttgctatacgggatgacttgaaaaatgaacttaaaatgccatctttttaatgctttaaatattttcttttattgtgagcccattaaaatagaaaagcagtgtaaatttttagttttttggaatgtaatgggtttggaggttaatttttaaaaataaggcctcatcaaaccaactcaaatgtgagttcagctgagtgttttttttccccacagtggggaggccctgccagcttcatgcaggccacaaataataaattactgttcccggccgggcgcggtggctcacgcctgtaatcccagcactttgggaggccgaggcggatggatcacctgaggtcaggagttcgagagcagcctgtccaatatggtgaaaccccgtctctactaaaaatacaaaaaattagccaggcgtggtggtgtgcacctgtagtcccagctactcgggaggctgaggcaggagaattgcttgaacccaggaggcggaagttgcagtgagccaagattgcgccactgcactccagcctgggtgacagggcaacactctgtctaaaaaaaaaaacaaaaaactgttcctatttaaaagttggaggtaataaaatttccctgcaagataaatgctatcagtttctctctattggaagcctgcttgctaattgaagttaattgctaatttttgataaactattttgttgaattataacatcgacatagaaaaatgcacacattgtaagtgtgcaacatgatgaacgttcacatgtggacatatccatgtagcgtctgctcaaaaatctcgaacaactcgggcgtggggcgggggtcattaactccacttcatgggtaatgaaacaaaatatcagataagtcacgtgactttttctccccaaggttctcagctaggaagagacatgcagcctgggcacagtggctcacgcctgtaatcccagcactttaggaggctgaggcaggcggatcacctgaggttgggagttcaagaccagcctgaccaacatggagaaagcccatctctactaaaaaaaaaaaatacaaaaattagccaggcgtggtggcgcaggcctgtaatcctagctacttgtgaggctgaggcaggagaatcgcttgaacgtgggaggtggaggttgcattgaaccgaaatcacgccattgcactccagcctgggcaacaagagcgaaacgcgaaactccatctcaaaaaaaaaaaaaaaaaaaaaaaaaaaaaaaaaaaaaaaggaagagacatgcagggagggtcacaggccagatctgcagccccacattcaagaagtggctctgagcccctgctgcagccaggggaggggctgagaaggtgggaagtgccagctgagggcaactgagcacaaaacactgaagtcagtcagatgggcccaggagggatgagggggcagggcttgtgggggatgccagggctggagagtgcctgtggctggtctgaccctgaccctggggttggaacagtcatcttagctccccaggctttggaattgggattttgagatcctgtatctctttttttttttcaaaactagagggctttgatggggtcattcagtttttatgtgaccaaaaagacatgtatttctaaagacacacactacttgctactgccatgttttatttccttatttacaaaaattttcggccgggcgcagtggctcatctctgtaatcccagcactttgggaggccgaggcaggtggatcgcctgaggtcaggagtttgagaccagcctggccaacatggaaaatacaaaaaaaaaaaaattagctggacatggtggtgcatgcctgtaatcccagctgcttgggaggctgaggcaggataatcacttgaacctgggaggcggaggttgcagtgagccgagatcgcgccattgcactccagcctgggcgacaagagtgaaactccttctcaaaaaaaaattcaggccaggtgcggtggcttatgcctgtaatcccagtactttgggaggctgaggcaggaagattgcttgaggccaggagttggagaccagcctgggcaacataacaagacctcatctttactaaaaaagtaaataaataaaattagtcaggtgtgttggtacacacctgtagtgccaactactcgggaggttgaggtgggaggattgcttgaacccaggaggtcacggctgtagtgagccacgatggcactgctgtactccagcctgggtgacagagtgagaccctgtctcaaaaaacaacaaaaaaattttcagtggccagttactagatagcattgttttattttttgaggacactctctctctctctctctctctctctctcacacacacacacacacacacacaaaggaaagaaaaaaaagaatgaagaccagtcctttgaacaccttcagctttacaaaacaacctctttgcgttgtcttcttttatctccttttgccttggacaggtgagaacttgtcacaggctggcctcggccctcagcctggtgtctgggagccctgaatggctgggagcgggggaggggtcagcagtgatctcttttagggctaattgtgtaggtcggggtggcgggaggtatgggggtggtggtggtgaagcctctgggtttccagacttaggaagtaaaactacaggctacgcagttacacctgaatttcagataaacaatcatttcttttagtgtaaatatgtcccaaatattttatactaacagaaattatttgccgcttatctgaaattcaagtgtaactgggcggcctgtattttatcaggcagtcctcgccaaaagacactttcaaggagatttgggactgagcagagtgtgctaaggagacctgagatgatgcctgtgggcgccgagtggccgagtgactctcgtctcctgactctgctccctgcgacccgagccacctgcagctgcagcccctgtgggcctggagcccgtttcgcaacacccccaccagcgccgcttggcaggggtatttatttatgtttttaatgaaagcaaattaagattcacttactcttgagagctgtgctacgattgcccttgtgataagtggagacacctggcttttctctacctggccggttgcctacgagagaggcctgcgtggggttcagtttcccaggctggtcccgcagtggcttttcaatccgtcatcaaatcttcatcaggcgtctctgcacacagcactgagggaagcactggcgtccaggctatagtcaggctccctgccctccatcactcaccatctacctgggggtgcagtagcgccccaggaagagtgaaacaataggtatattatccccaaccccacccatggcacgggcattgctgtcccccacagagcagataagaaaactggggctcagatgttgaaggaccgtgttgaagagcacagagctggtttgtagcagaagtggaatttccaccttgatctctgggttccctctaccagacccatggttctcagcccagggagcactgaaaaaagctccaggcccagatattctgatttaattgttctggggtgggtactttttaaagttcctgaagattccagtgtgcagagagacctgggcctccccccaccattgagacaagtgcctgctccggctgttcagaggaggcagccccacagcaggagaagcccctctccactgaggacagatcagagtccgcagaaagaacatgccggggactggatggcttgagcagcgctgagtgggaatgcacgagggacactagggcagtgactggcccctcctgcaggtccggagggctcatgaggcgagtaagagggaaagctgagattaagtgagattctaggctgggcgtggtggctcacacctgtaatcccagaactttgggaggccgaggtgggcagatcacctgaggtcaggagttcgagaccagcctggccaacatggtggaaccccatctctacaaaaaatacaaaaattagccgggcgtggcggcgcacgcctgtagtcccagctactcaggcggctgaggcaggagaattgcttgaacccaggaggcagaggttgcagtgagctgagatcatgccactgcactccagcctgggcaacaagagcaaaactccatctcagaaaaaaaaaaaaaaaaggatgagattctagatggaagctaaaggatgagattctagatggaagctggaggatgagattctagatggaagctaaaggatgagattctagatgggagctagagggaagctaaaggatgagattctagatgggagctagatgggagcttgcctcaggcttttctgttgatgtttctcagggatcctctcttcccctggagcaaaaggcacagatgaagtgtcagggaggacgccagtcccatatcttcttctcaccctggagtggcagtttcctcacagaaagcccatcctggctcctccccctgcaaggagggatgtggagggacagaggagcagcaggcaaggccagcaggaggtgacataggcagggaggaccaggccaaggttgggaggagtctacatttggcgctggggttggacacctggctgacctctagtgtgtggccttgcggtggctgatggatgcccctccacccccatcccacagtgcctatgttccccaaagggtgtcccgtggaactggcaaggtgccttgtgatgaaaaggttctggggtcaatacatttgggaaatgctgcatgctgtagcccttatggacacccacagcccccacgagcctcctacaggctctgagaagtccagcaatgaagagaagcctgtgaaggtttgtttcacgttcaactgttgccactttgtgacctcagagccctcttttctgtgtgacattgacacctatgcacatgacggagggcaccctgcagcaggcaggcgcaacgcaaggggcgcggctgcaccaggctccccccgtggagtgattcgctaaagaaggtgggaagtgggggtgtctctagcatctgtggtccccaagttaatgaggaggagccatgccctgctcaggctgctggtgagggagggaagtgccttctctgaggatgcgcttgtgatgaatccaggaagggggcgctcttcgggggagcccagcagctgtcagaagcctggtgtggaggaccaggagcgcctgaacctcagggcttgaggctgcgccctggctcgcctggtctggggggaagctcaggcctctgtgggcctcagttactgacagacccagaaccctgcctcgtggggagggaatcagtgtgtgtgagctgcgtgatctcagactctgcatcatatattctatagaatgcaggcgtacatggaaaccgcacatcaggagcggatggcgaaagactgcttgaaaattggctgcagaccaaaccacctaaatccagaaacaaaccgaaacttgctttaggtcctaataacagtgagtttacttgtaaaagctttcattaatttaagataaaacaaaagaccctttaaagtataataacactggttgggcacagtggctcacgcctgtaatcgcagcactttggaaggccgaggcaggtggatcatctgaggtcaggagttcgagaccaccctgaccaacatgttgaaaccccgtctcttttttttttttttttttttttttgagatggagtttttgctctgttgcccatgctggagtgcgatggcacaatctcggctcactgtaacctccacctcccgggttcaagtgatccttctgcctcagcctcctaagtagctgagattacaggtgcccaccaccacgcccagctaattttgtttttgtttttgttttgagagacgctcactgtgtcgcccaggctagagtgcaaaggtgcgatcttggcttattgcaacctctgcctcctgggttcaagcgattctcctgcctcagcctcctgagtagctggaattacaggcacgtgccaccaggcctggctaatttttgtatttttagtagagacggggtttcaccatgttggtcaggctggtctcgaactcctgacctcgcaatccacacgacttggcctcccaaagtgctgggattacaggcatgagctactgcacccggctaatttttgtatttttagtagggatgaggtttcaccatgttggccaggctggtctcaacctcttgacctcaagtgatccacccgccttggcctcccaaagtgctaggattacaggcgtgagccaccatgcctggcctgaaaccccctctctactaaaaatacaaaattagccaggtgtggtggtgcatgcctgtaatcccagctacttgggagactgaggcaggagaattacttgaacccgatatatatagtgtatgtatataataacactgagataggcacagtggctcatgcctgtaatcccagcactttgggaggccaaagtgggaggatggcttgagcccagaagtttcagaccagcctgggcaatagagtgagacaccatctctacagaaaatttgcaaattacccagatgtggtggtgggcacctatagtcccagctattcatgaggctgaggccggaggatcacttaagcccaggaggttgaggctgaagtgagctataatcatactgctgtactccagcctgggagacacagcaagaccctgtctaaaaaaataaataaataaaataatatactaacattgatttcaaaaaatgtgtccatggataaaaatataatgaatatattcatcacacatggatatgttcctggacatatcagtatatatcatgtatatctttttttccaaaatgtgaaagtaagtttattatagaaaatatggaaaacagagaaaaatacaatgaagaaaataagtcacatttggtgtattgccttcctgtatttttatgttttacatttattatgttttacatttattatgttttatgtttctgttttctacaagaacaaaatccggccaggcacagtggctcacgcctgtaatcccagcactttgggaggccaaggtaggtaggtcacttgaagtcaagagtttgagaccagcctggccaacatggtgaaaccccgcctctactaaaagtaccaaaattagccgggcctggtggcacgtgcctgtaattccagccacttgggaggctgaggcaggagaatcactcaaacccaagaggtggagtttgcagcgagttgaaatcatgctactgcactccaacctgggagacagggtgaaactgcgtctcaaaataaataaataaagtaaaatctttatttacatatagtacctgttgccttcattttaaaaatgttttattttattttattagagatggagtcttgctctgttgcctgggctggagcgcagtggtgcgatctcagctcactgcaaactctgcctcctggattcaagcaatcctttagcctcagcctccagagaagctgggattacaggtccgtgccaccatgcccgactaatttttgtatatttttgtagagacgtggtttgaccatgtgggccagggtggtcttgaactcctgacgtcaggcaatctgcctgccgcagcctcccaaagtgctgggattataggtgtgagccaccgcgcccggccttaaaaaagtaatttattaaagtgaaattcacataacacaaaatgaaccatttgaaaatgaacaactcaggggcctttagttcattcagtgttgtgctaccaccatctctacctgttccgagatggttcctctggttttcattgacacttgtcacagttgagcacactctcccacccagtcagagaacttttatttatttaactctcaacctagtattgaagacttgcttgttttcaatttcttggtcttgtaaatggggctcctacagacacccttgtgcatacctttggtcggactgtctatttcctgacggcagggccctgagcaatctcgtcccacagctcagtacccccctctacctggatgactcacagagttatatttccagcagagactctgcctctgcacaccaacccatatatcccagcgcccacctggtagttccccttggatgcattgaacacacaacacgacacgcccagagccagcccgtcctctctctgcaaggtgccacctgccatcctgctgctcccgccggaatcctgagagtcatccctggcgattcgcgccccagctcagcctccagatgcagcccaaccccagttctgggtgattttatctttggaattttgctcaaatacattcccatctctccctttccccaacctaggtccaagccagcatttcctcttgcctgaagcacaacctagactcctaaccggactctggtccgtccggtcactccacatctcactgagaaccaagattgcaaaatgcagattagatcgcctagccctgcttccctctcagaactttctctgacttcctactcctcttaatataaaaatccaattccttaatgtgtctacaaggcctggttcctccactatgtctccagactctctgggctctgacctccagggccctcttcccattccttgtgtggaccacactccttgcagccacaggacctttgcacaggccattctccgccagcaccctcagccctctgtttttcctggttaatccttgctcatcatcccatctcaacctggtcttccctgccctccaccatgggagagtccctgctctctccttgcacctacttaccctttaccgctgttgtcattttatttggattatatgattatttgatcaacatctgttctccctaccaacgtataagcactccataccgctcttgttatttatttatttattgagacagagtttccctctgtcgtccaggatagagtgcggcggcgtgatctccactccctgcaacctccgcctccggggttcaagggattctcctgtctccacctcccaagtagctgggattacaggcccccgacaccacgcctagctaatttttctattttttagtagagatggggtttcaccagttggccaggctagtcttgaattcctgatctcagctcttgtcattttatttggatttattctaagattatttgatcaacatctgttttccctatcaaaatataagcaccccatcctggggcccataatgagtaatcaagaaatatatgttgaggccgggcgtggtggctcatggctgtaatcccaacactttgggaggtcgaggtgggtggatcacttgaggtcaggagttcaagaccagcctggccaacatggtgaaaccccatctctattaaaaataccaaaaaatgagccgggtgtggtggcgggcgcctgtagtcccaggtactagggaggctgaggcatgagaattgcttgaacctgggagggggaggttgcagtgagccgagatggcgccactgcactccagcctgggtgatagagtgagattcttgtctcaaaaaaaaaaaaaaaaaaagaaaaagaaatatatgttgaatcagtaaatgaaaaagcaatgtaattaccaggacaaagcacatgggcatttggaaagctctggaggatatttccagagtgctttccggaagggtggtagcacggaacacttgcaccaggcatatgggagggtctgcgtagccacgccttcaccataaatttcacacatgtagcaaagcttcagtcatctaacaagtgcaagcccccgggccagccataaagtgagagtacagtcagcagcagacgctgagccaagcaggcagagagcagctgactgagtcaaagatgaaaaggtggccacagacctggcgtgtctgggcccctctggagccagaagacaggaaccatctccctggttgcctgttaaagccacgtctaatcattcaggcctggaagtctggggaagcggcagaggaaaggactggaaagaagttgacagaagaggctgagcatggtggctcacacctgtaatcccagcattttgggaggctgaggtgagcagatcacaaggtcaggagttcaagaccagcctggccaatatcgtgaaaccccctgtctactaaaaaaaaaacaaaaaacacaaaaattagctgggcgtggtggcacgcacctgtagtcccagctactcgggaggctgaggcagaagaattgcttgaacctgggaggcagaggttgcagtgagttgagatcatgccactgcactccagcctgggcgacagagtgagactctgtctcaaaaaaaaaaaaatgttgacagaagagaagaaaaggcaggcggaggtggcagagctcagagacagaggcaggtgtcagaggcagtggcgggctcaggaggtctcacatctgctgccagtgtgagaaggtctgctctggggaccgtctggggctcatcggctcacacttctggcactggggctgggaagatttgaagatcaggactgctgaccagggcacctacgtggggcttccccatggtgtgttgatcctaagatgactgcagtgatccttgtctcctggtactcacagcctctgtagctcctttctaagcaacagaatatacctctgtgcaacaatcaggttgcaagagattctcattttcctcttggcagcagactcccttccttattggctttgataggccgagtggctacgttgggaaggcccacacaggaggagcccatttctagctggctaagaactcaggtgctctgtctttgagccacctttttatttttatttacttttattttatttttgagatagggtcttgctctgtcactcaggctgaagtgcagtggtacaatcacagctcactgcagcctcaacctcctgggctgaagcaatcttcccacctccgcctcctgggtagctgggactacaggcatgcatcgctgtgcctggctaactttaaattttgtgtagagacagggtctcactacgttgcccaggctagtctcaaacttctgagctcaagctatcctcctgcctcagcctcccaaaatgctgggattacaggtgtgagccactatacctggcccttcaagacttaaagaaatgaaattctgcaccaggtatggtgcctcatgcctgtaatcccagcactttgggaggccgaggcaggcggatcacatgaggtcaggaatttgagagcaggctggccaacatgatgaaaccccctatctactaaaaacacaaaaattagccaggtctgatggcaggtgcctgtagtcccagctactcgggaggctgaggcaggagaattgcttgaagctgggaggcagaggttgcagtgagctgagatcacgccactgcactccagcctgggcaacaagagtgaaactccgtctcaaaacaaaacaacaacaaaaaacaaaacaaaacaaacaaaaaaacaaggccaggcgcggtggctcatgtctgtaatcccagcactttgggagaccaaggtgggtggatcacctgaggtcagacgttccaggccagcctggccaatgtggtgaatctccatctctactaaaaatacaaaaaattagccaggcatggttgtgggtgcctgtagtctcaattacttgggaggctggggcaggagaattgtttgaacctgggaggcagaggttgcagtgagccaagattgcgccattgcactccagcctgagcaacaagagcaaaactctgtcacacacacacacacacacacacacacacacacaaaacaaacaaacaaaaaagaaatgaaattctgccaagtactgcatgagcttggaagcagatctttccccagctgagccttcagatgaaaccccagcttgagaggagacagaagacccagctaagccccgttcagaatcctggcccatagagactgtgacacagtacgtgtgtggttttaaaccatgaaatctgtggtcatttgttacacagttacagatgactaatacagtccctagggcatcctcacgacatgagggctcaggtggtctgactcccacttggtagctccgggctctgaatgcaaggagcccagagaacacagtagcagctgcagccccttctctgacacaagccttgggctcctcctgtgcaggacttcccaacatagccgctgagtctatcaaagctagcaaggaagggagtctgctggaaagacaaatgagaatctcttgcaaccttatcgtgaaagtaacagcccctcggcatggaggtattctgttgcttagaaaggagttacagaggccatgagtaccgggaggcaaggatcagcatagtcatcttagaagcaacttaccgtggggaagcccccaagtaggtgccctggtcgacagccctggtgccagcagtatgagcccgatgagccttcagctggtccccagaccagaccctccattcttggcaggcacttctgcctcctctgtcagttacagttggacagttcctccctgtgggaggagtttcaaggtcacatggtggagaagcgggtggaatgggagatcttgctgtggctgttctgaaaaacctgctctgccacggcccatcttcaggccacaactcacatccctcccacgtgcgaagtccacttgccccatcccaagacttctgaagtctcatccactttagttttgggctcagactggaggtccaggatccagctgtgtaaaccaaggcctggtgaggaggagactcctgggcgtgggggctcttcaagcccgggggtgttttctccgtgcccgtggctccttcctgagttattcttcccttttcttaaaaaactgagtttgcaactgagtagccctctcagcccatttccttcctttaaaagttgaggctctaaaagcctctttcattttgtcctgtcttcatcccatttagtgcaagaaattaattcctttaaaaacttggctgggcgccgtggctcacgcctgtaatcctcgcactttgggagactgaggcgggtggatcacctgaggtcaggagttccagaccagcctggccaacatggtgaaatcctgtctctactaaaaatacaaaaattagctgggcatggtggtgggtgcctgtaatccagctactcgggaggctgaggcaggagaattgcttgaacctgggaggcagaggtcacagtgagctgagatcacgccactgaactccagcctgggtgacagagtgaggatctgtctcaaaaacaaaacaaaacaaaaaacccaacttgggaacttcctatgtactaatctaaaattcattccggccaggcgcagtggctcacacctgtaatcccagcactttgcgaggcctagacaggcggatcacctgaggtcaggagttcgagaccagtctgaccaacatggagaaaccccgtctctaccaaaaacacaaaattagccgggtgtggtggcacatgcctgtaatcccagctactcgggaggctgaggcaggagaatcagttgaacctgggaggcggaggttgcggtgagccgagattgcaccattgcaccacagcctgggcaacaagagcgaaattctgtctcaaaaaacaaaataaaataaaaataaaattcattccattagacaaaaaacctccctcaaaaaacttaaaaaaaagaatagatgttttcttttggagcagctgtacgttaacaaaaaagttacctggagagtacagagaattcccgaaaacttcctctccccgctcacccccccgaaactttcctgctcattaacatcttgcattaatgtggtgcatttgttacaatcgatgagccaatatgaatacattattattagctaagatccactgtttacagtcagttttactctgcgttttacacgacatgggtcttgcccaatgaataatgtcaggcatccaccattacagcatcatatagaatagtttcactgccccacaaatcccttgcacaccatccattccttcctccttccctcgcaccagctcctgattactgttttcatagctttgctgtttccagaatatggtctggttggaatcatgcagtaggctgcagccttttcacgttggcttctttcccttagcactacaacgctttctgagataagctcttctccaccccacctcccaaagtgcggggattacaggcgtgagccaccgcgcccagcttcaagtgagaaaagacccttgtgatttgagaagacctgctcttcaacagagaaactccgcaaggaatgccgctaaggtcctcagaatgcctttgtctgtccgaaagggtttatggggcacttttcctttttttccctgaggtcttcataaaggatcttacagtcccctctggacttctttgtcctgaggccctttctcactttgagaatcatttgctggctgaaaagcctgttccggtctttacatttcctcccagcttcactggaaaatgaaatcgtttgctcctagttcccctctctccttttccattttattataggcagaaggagccaggagcaccttcaacgacctgcctggaaaactcatcagctacagcaacaagtcagctaggtatgctcggtgtctactttctatgctatggcaggcaacagttttattaaaccttctgcaaccacatgagaaagggttcctttcctccaatagccagtagcattttcttttttctttttctttttcttttttttttttttgagatgcagtctcgctctgtcacccaggctggagtgcagtggcatgatcttggctcattgcagcctccatctcgcaggttgaagcaattctctgcctcagcctcccgagtagctgggattacaggtgccagccaccacatctagctaatgttttaatttttattagagacagggtttcatcatgttggccaggctggtctcgaactcctgagctcaagcaatccacccgcctcagcctcccaaagtgctaggattacaggcttgagccaccgcgcccagcttgcgtttttcttttttctttccttccttccttctttctttccttccttccttcttccttccttcctttctttttttctctctctctccttctcttcttctttctctttctttctctctttccttttttattttattttctttattttcttttttttttgacggcgtctcgctctgtcgcccaggctggagtgcagtggctcaatctcagctcactgcaacctctgcctcccgggttcaagcaattctcctgcctcagcctcctgagtagcttgggactgcagacacaccacaccacgcccggctaatttctttatttttagtagagatggggtttcaccatgttggccagactggtcttaaactcctgacctcaggtgatccacctgccttggccacccaaagtgctgggattacaggcctgagccactgcacccggcctctttcttttttcttttcttttttttttttttttttaaaagatgtgatcgtcgggcatggtggctcacgtctgtaatcccagcactctgggagtccgaggcgggtggatcatgaggtcaggtgatcgagaccatcctggctaacacggtgaaaccccgtctctactaaaaaaaaaaaaaaaaaaatgagccgggcgtggtggcgggcgcctgtagtcccagctactcgggaggctgaggcaggagaatggcgtgaacccgggaggcggagcttgcagtgagccgagatcgcgccactgcactccagcctgggcgactgagcaagacttcgtctcaaaaaaaaaaaaaaaaaaaaaaaaaaaagatgtgatctcactatgttgcccagggtgatcttgacctactgggctcaagtgatcctcctgcctcaacttcccgagtagcagggtcatgcacttttgggccaggatcatctcttaaccttcctgcaagcccttgccaacttcctccaggcttctgcccactgcctgcgcctaaagccaatgccatgtgtttcatattttagtgaccagagcacagtgaggcacgtcagacccattagctttctaatcaccacaccagctgtgtgagttgggggttgggtactgccctcccctttcataggagtgggcactgagaattggggaaattacacaactggtcataagcactcaattaggaggaggaggaggaggaggaacagagtgtttgaaagacaatttttaaaaattggatagcacagtagcctggggacatttgcgaaggagtaagatggcggcgtgtgcgttgataaccgttcaaggtgccatcgtgacggtcctgagccaggagggaaagagtcatatgtttgctatgctcttctcaccaaggcaggggattgtgtcatatgttttagagagttgtctgtgaaaaacaattaaaacttgatgcttaggccgggtgtggtggctcatgcctgtaatcccagcactttgggaggccaaggcaggcagatcacttgaggtcaggagttggagaccagcctggctaacgtggtgaaaccccatctctactaaaaatacaaaaattaatcgggcctggtggcagcaggcacctgtaatcccagctacttgggaggctgaggcaggagaatcgcttgaatgtgggaggcagaggttgcagtgagccaagatcatgccattaaactccaacctgggtgacaagagcaaaactccatctcaaaaaataaaaattaaattaaaaaaataaaaaaaaaataggccaggcgcagtggctcacacctgtaatcccagcactttgggaggcctaggcaggtggatcaccttgaggtcaggagttggagaccaggctggccaacatggcaaaaccccgtctctactaaaaatacaaaaattagccggttgtggtggcgtgtgcctgtaatcccagctacttgggaggctgaggcaagagaattgcttgaatccgggaggtggacgttgtagtgagctgagatcatgccactgcactctagcctgggtgacagagggagactctgtctcataaataaataaataaaccaggtgcggtggctcacacctgtaatcccagcactttgggaggctgaggcggggggatcacctcaggttaggagtttgagaccagcctggccaacatggtgaaaccctgtctctactaaaaaagaaaaaaattacaaaaaaaaaaaaattagccaggtgtggcgggcacctgtaatctcagctactcaagaggctgaggctggagaatcacttgaacctgggaggcagaggttgcagtgagctgagatcgcaccattgcactccagcctcggcgacgagggcaaaactccctctcaaaaaataaaaaataaaaataaataaataaaaacaaaatttgaggcttaaacaattaagcttcgtgcatctctttaatttttcttttttttttttaactctaatttcatgacagattaagcttcatgcatctcaaaaatgtgtagaaccctcattcccagccttccctccctctctcttgtccttctttctgatttcttggaatcggaaggaaaattcggatatccaggaaccatcacacaggaggcacccatgtgatgtgtccaacatcactccacgcaggtgtccttgggtcctgggtgcccaggttcctgtgaattgtgaccccaggcagaagcgtgagcatccgcagaggaacccacctacccaaagccagggaacagccagggctggcatcctcagggtgactgtgctccagggcacctctgacttgtgctgagtaaaatggacaaagccagcaatgcacccataacccagattcttgagacaccgctggactttgggaatcccaggcattaggctcgtggcagtgtcatcatggctaggctgggggcagtgtcatcatggtgcttgctggccaagtcaggacacggcctaagccggaatctgctggtgctggtacaagcggtgagtgggcgtgtgggtgggggttgcggttagggtgtggacatcccagaatccaggacgctgttcacaattcgtccatactccctgctcccctcccttacagcacttccctcccgaggcctcctgagcctctaacccccagataaggaaaggggtggactcagttgaagtccagtgtccactccggtccaatcagctctacctggggtgaggggaaactcctctggctgggctgctccctctgcagggctgtggctggacagattactcaagaaaggaagcaggtgggccggaacgaacccacggtgccacataggcctccgttctcatgcatataagtttcccacactcaggcaggaaatgaaaatgcttcttggacccccaaggagagtaaaggagaggggaagaggaggaggatttttcggggctgttagtgacactttcagcctcctgtgcatttttgggagggctgcaggagaaggcaatgctgcgcccctacccagaactagcgagcgcttcccaactggcctcccgccttcctctcgtcctctacggcctccattggcagctgtgcaagggcccggccctgcctctgtctctccacactcgctgtgatacctcaggcctcccaggctccgccacgcccttccctctttcgggaacagctgccttccatcaccttggctgcctggctaattcctgctcattccttaaaaccctgttttgatttcgcctcaataaaactctgacaccaccctccagtcataattagtcacttcttcctctgtacgttggaaacaccgctttatcgtggagactttaaggatatccaagtagagagaattcttccgtgcaagttttgcatcctctcaccactgcctgcgttacccgagttgtaaagggcggctccctgtgtctgccccgctgcaccgatacaccgagctgcgcacggtgcccagcgcagggagaacaaatgatcatctgtccaacgcgcccatttacaggtgaggaaactaaggctccaactcaatcgacgcactctgcccttttgattaccagaaaagtagcaggacaggtgtcctgtcccgccctaccccggcccactaagccggcaccccggctccgacccccggctgtgcccggcgccgccgcggtgcccggcgccgccgcctcgcccggcggggccgcccggagcgcccgcacctccgcccgcttccacctggccgggcccgccccgcccggactcgggactgggaagtgcggcgactcccggaaccagccattggcgccagcgcggggagctgggggtgcagagctgcgggcgcggcgggccacgcaggcggcccccacccccggcctggcctggtctggtctggtctgcgctgccgcgcgggggcgccccctcccaggcccggcgcccgccagccccgctccgccaggtgcagcgcagcgcaggggtgggcgggggtggggctcggcgcgcacgttcacggggcggggagggggcgggtcaggggcgggaccacagccggctgggccggggttctatgcgcatctccggggaggggcggggcgggggcggggccggggcggggcccggtcggtgcactccagacggcgggccgccccctcttcccgccttcctactaccggcccaggattagcgccctgggagcgcgcgccccgctgcctcgccgccacactttcctgggagcggcggccacggaggcaccatgaagaagtcttactcaggtgggcttcgcgcccggggtggggaggggtcggtgtcccgggaccagcgctgctcacctgagtgcctgcggccgggagtggcgaggcgcccccggagctgagcgagtccccgcggcgggcacactgcaggtcgagttcctcccaggacagggccgctgtcgggccgctttcgacctgagccgaccgtcccctgcgctgtctccagcccttgctcgagtgtcggaggggctgccctgggggacgctccctcttcctcgccccttgcaccctcgcaggaatcgctgactttccaggtcggccgggtgctttgggtccctgtgcgtctgtgtgggtgaatggggtcggggctaggtggaggggtgtccttgggttcagcctctagggctggtggtccaggccgcagcatcctttcttcggattctcttcggtttctcctctacttagtggggcacgggacggcctccagatgggaccgtccagcagcgcccaaacttggcgactcgggttcacgttttgcgctcaggacgccgcccgcggctgacatcctcactccaccctagcagggcccgccttaagtaggcgaagggggcctgacttgggcctcaccatgagccggttcaggagctttcatttcataagaggctcccgctctggcactctgaagttccatttcacagatgggcacaccgaggccacaagggcaggttaagagaaatccagatcttcattatttgtcttttccttccttttttttttcctttgtggttttctccaaaggatccaggcaggcaggatcctttgtcctcctcagtcctcaaattataaatagcgtctcctcttctaaatctagaaaccgtttgtttaatgtccctcctttaattcattcagatagaaaggtacctgccaaggatccatgaattaatttttattgataggagaacagaatcatgggccttagttggaggtgaaggagtcatcggggccatccccctgcctttgggccattgtcggtttcctctggctttccatatttaggaaccaaaatgagtgataaagtaccttgtctcaaagaggattactcagaacttccccgaaaatacccttctgggtcagtagcttagaatttcaactttcacccggttgttgcgaacaagatggccctctacgcacccggagcacagctctgtcaggagcgtgggtgggttggtgtgctggtgggcgggagcgggcttccaggtggcacatgcttggttttggcaccggggcttcctccccaacatgctccaaatacttgagattgttgtggggatcgcgcggtgcatggccctttccaggggatctctagcccgcccagggagggccctttgcccttggtttcttacactttacctcccactggtgggtccagacagtgggggtgaccggggtcctcccaggtcgtgggtcctgggttttttctgcggagaccctcctgcacagatgccggaagggccctgaggcaggcttggagtctctgcacctgcggcttactgggaggtggggagaccatcacttgtccttttctcctctcctccacacacacctaccccacccctcactgggtttcttttttttttttttttttaaaaaaaaggacagaaccttttgcagtaggtggaagtagagtttgtggagtgagcaggaaccaactcttgtacagcagcctcggtgcctccttgtgtttacctaaaggggcaggcccctctgaggatgggggaagggagggctcagaccatttctggtttgctccctgcttggcagtggcccaaggtgtgctgggtcactgtgttgcagttgtatggagtgggactggagggggctgatggtgggggtggcctcttgccctcattctgagtgtcctggagctgtcttggcaccagcccttttccgggtacgggcactcgcaggagtcaggctgaccccccaacaagccatcgacaccatgaaattaaggaaagcagcaaaagatgttaaaaatcccccaaggctctgacaatccaaggacaacaggaaggtctttattttttcatctagactgtgcgggattattgcttccagacctgtatgtgggcttcagaataaacggaatgaccataatgttgttcccggtagacctggtttgaacattcgtgagcctctgaaaaggagaaagattttagaaggatgtgttggggcaatctcaagtaccgtgggtctatagacagtcatcgaagacactttatgtgctgggcacacatggccaagtctgagtgggtacagaaatggtaatgagatatagtccttgcctgcagagaacttacattctcaccgggagtcaggatgagggcgagacaccagctcattaacacccttccctcctgagcagttcagcctccaaatactacaggaatgccccggaggttttaggtggaggtgagattgagctgggccttgaggaaggagaagtcttgagtagtggagaataaaaagggacttggccaggtgcgcttgaagtcccagctactcaggaggctgagacacgaggatcgcttgagcccaggaggctactcaggaggctgagacacgaggatcgcttgagcccaggaggctactcaggaggctgagacaggaggatcgcttgaagccaggagttcaaggctgcagccctgtgacagcgcctggaaatagacacggcactccagcctgggtggcgtcatgagaccccatctgtaagaaggtcttttccaatgcggaaggcagcaagggcccacacagggcagctgcaggatccagggggacactggggacaggttctctctggcagctccactgctgctccaggctttcccgattgcctcacccggccttccaatggggtggaggtagtggtagtctacaggcagtgtggtccagtggttacacttgggggctcagagccgccagccccttgggattaaatctcaccaggctgcgcctctccctgtggcacaaggttctcacctcatgcatctcatttgcctcatttgtttttttgtgtgtgtggtgttttttaattttatttatttatttatttttgagacggagtctcactctgtctcccaggctggagtgcaatggcatgatctcagcttactgcaacctccgcctcccaggttcaagtgattctcctgcctcagcctcctgagtggctgggattgtaggaacgtgccactgcgcccagctaatttttatatttttactagagatggggtttcaccatgttggtcaggctgatctcgaactcctgacctcgtgatctgcctgccttggcctcccaaagtgctgtgattacaggcatgagccaccacgcccagcctgcctcatttgttaaatgggacagtgctatgttgttgtaaaggttaaacgagttcatatttgaaaaagctgagaaatgcctgctctgtaacctgttagctgctgtcatgatcatgattgtcattgacaggaggatggagaaggctggggttacgccattgctaggacgttccagaagcctccatgatcttcccttactgtggtcagagcatggtgcagggtctctcccccagcccctcagcactggagccagctgcactgtacccgccctggctctctaggttctgagttttgggactccctttgcatactaggtcacatggaacttgccgtcattcccaggctcccctggaaactctctgtgggtggcagcggcaggaggacttacccgaggccgatgagccacagaagcgggactgaggttgcgtcacacccctactggcacctgggaattactctggagattctttttttattttttatttttttgagatggagtcttgctctgttgcccaggctggagtgcagtggcacgatctcggttcactgcaacctctgcctcccaggttcaagcaattctcatgcctcagcctcctgagtagctgggattacaggcatgtgccaccgtgcccagctaatttttgtattttttagtagagatggggttttaccatactggccaggctggtctcgaactccggacctcaggtgatccacccgcctcagcctcccaaagtgctgggatcacaggcatgagccaccgtgcccagccactctggagtttctctgtggctttcaggagattcctgaaggggcaccagccacgattaaaaagctctatgctgtcgtgacttctgagtcctgggcagggagggaggctgcacccacacaggaagcagcttctgccgtgattcagtgtgctggctcgccgtggtggacagggctgcaccctcacccagcgccccgggagctgacttacgggaagggcaaggaattgcaccctcagagaacacttccccagtcagctaacccggtgacaggcgagcgtgggaagggcacaagcacagggtttcttcctcttctcccccagccccgtctccgcgcctgttctcgctgcctcttgcctcctcacgtccaagcttgtctgctctggcgcattcaggggacctggactggagagaaaaagccacctcgtacggttagtctgtggctctgtctgacttgtgtcctccgccgaggcccctcagttgtgagacagctggctgagcctaagtcctggggccagccctctccctagtctgttgcaaaggtagaaaggcatgcccaggcaggggccacctgccctgcccgctcacgccagaccgcaggcacttgcccgtcagatctccccggcctgcccagagggattctgatagccgagggcaatgcacctggcagcggagcattgcgtttgcgacagtccaccttcttcctggaaccaccccccacaagtgtgaccagctcaagccaggacaggtacagggggacccaggattgccacttaggggcagtggtctggaatccaggtccaggtgacatgggagccaaccctctgcttggagatcccaggtgggtgtttgcagaggacatctcacttgaggacccatggaaggggacacttcccaccccctacctggtccttgggctgccctcctctgacactctcctgccatcccaggcagccctgacagccccatgtgactgggacctagaggtggcccctgtttccgccccagtgtttgtccacaggcagtgttgcgtgggctctgaagtttgcctaagatggacctgataaggggagttcagtacacatcagtgcaggcccggccagggggtgatgatggcagttcctgggcagatccagctggctttagggtaggaggggctccagagagaggctccaggcccctaggggtgtgaacctttggggtgaggcgggaagtgacgcgctgggttcctgcgcctctgtttgttggagctattaccttggaaacatcccagctctaggcggttgccagggatttatggggatcagtgggtgccaatccctgggtgaagccctcggggcttgtacacagcacacagcgctgtggccccatggctcactttgctgtgtgaagtggctcagtctccgggagagtccttagccaggcaggcctgacggcaactgccaggtcatggtgatctggaatcgctgaccaaagggagtcagtcctggtgggtggagggacttggtgggcagccatcgtgatgccaggcatggggatcgtgtgtcacccaggcctgtgggtgccgagcttctgtgggagcagtgaagtgcccccgtggccgatgggctggtcacccctgcccctttcctgatgtgacagttgtgcctgggccccgggaaatttgccaggaggcctggcattggcctgctctactggagcggccctgctgagctgtgagctgcccgtctccctgaggttcctagcccatttcaactctccatgtggatttggtcattcattccagaagcgtctgccgggcgctgctgagtgtcaggttctgtttgcctcctctcctgtacgctggaggctctgggcaccagctctgcagggtggcctggccttgggtctccagggtagagcatggcactctctgctcccagcccagtttctctctgctttatctccctgaccccaccctgggcatgggcccatttgcagcccctgtgaagggagacattgagctgttgctggcagaggaggggcggctcctgggcactgcttgccaatggcctctcggcagctctgtgacagctgagctttgttcccagcctaatctgacctggttctccaaagcatgactgttggcagcctgaaaacctccaggacaggaaacaggagtggcgcagggaatgtaagatgatcccagcttcaagtcactgggcggcccttagacccaggctgcctgctgtctctggcaggaactcaagtcgctggtcatcctcagagcggtgttggcccggggccttcagtggcctttgtgtctgggtgagaggaaccctggatggccactctgccctgagtgtgtgggtccccagaagtgctgggttagggggcacggagggccagaaagtcccctttggagcgctggactctctcgctgactcctaccccaccccggcctggggtttcagagaaggggtccaggcaggagtgtcatcttttctcaatggggatgtggcttcagtctctgtccaggtgggtgcattgctctctttccggctcctcccaggctgcttaaatgacctgtgacgaggcctgcgccatggccggggccctctgcttttcccagcgctgcacctgggaaccaggggttgggccccggaagccgaggatgtccctgaatgccatgcctgggcacctgtcctggccaggcgaggcgtgttggggcagcggctgagatgggagcagcagcattgcctgccaggtttgagatgggccccgggtgagtgtggttaccaggaagggctgggcagagcaggcgggtgggccgcccctggggccttgttccgcagatcaacctgatccgcaccctggggccggggcttcctttcacagccttcccatgaactatggctcctgtttccatcccaaatcagatcccagaagaggaataatgtccatgtaacccaagccagttggaagtgggttacatccaacccctgtcatcttccagcttgttaaggacttgactaactcaacccagagggatttggagggttgtctgcaaaacccactaataacagggaactttagctctgtagccacagggtctacagaggtgtcgggctgtcgggttattgctgggaggtgagccggtggcgtagacaccatggaggcaccggtagtggaagagctgcaagtgcacacagaggccggcaccgaggggcggggaggaggaggtggtggatttctcgccagtgttggcatcatgttgcctccagcatcagagacccaaggtgtggctgaccttggctggggcgatgagtcattggatagcagagccttcctggtagctgggggttaacgctttaactgccgggactttgtattatgccgcttcttttttttgttttgtttggtttggtttggtttggtttttgagacggagtctcactctgtcacccaggctggagtgtggtggctcaatcttggctcactgcaacctctgcctcctgggttcaagcaattctcctgcctcagcctcctgaatagctgggattacaggcacgcgccaccatgcctggctaatttttgtatttttagtagagatggggtttcgccatgttggccgggttggtttcaaactcctgacctcaggtgatccacctgccccggcctcccaaagtgctgggattacaggcatgagctaccgcgcccagcttgcatttatgcttttttttttttttttttgagatggagtttcgctcttgttgcccaggctggagtgcaaaggcgcgatctcagctcactgcaacctccacctcccgggttcaagcgattctcttgcctcagcctcccaagtagctgggattacaggcctgcgtcaccatgcccggctaattttgtatttttagtacagacggggtgtccccatgttggtcaggctggtctcgaactcccgacctcaggtgatccgcccgccttggcctcccaaagtgctgggattacaggcgtgagccaccgcacccggcctatgctttttattattattatttaattttttaaggaaagcaatctaaactgtacactgtatcttttctttctcttttgctttttgttgtcagttttctgtattacttattgccaaacaacatgaacaggaaattgaaaggaaaacttcaacaatcattggctgtagcatttcttctgtgttccattcagtgcttgtctcctcaggaacatgacatagggtttgatttaattatgaaaggcgtatattttcagagttttatactccccatagaatgaatgttgaattctgttcttttcacttgaaattagatctcaggcatggatttcatgattatcactataatggctcttcagagtggacattgcatcttgtagggaaccaccctctccccagctgctggtgtggacgctcctccttgatggtgtgggtctgggcccctgaagggtggtgtcctgagtaaagatgttacagtagccatgcttatagctttgggcctggggctaggtggagactggcttcaaccctagagcttgctgtcttaaaataaattcttttttttttttttttgagatggagtctcgctctgttgcccaggctggagtgcagtggcgcgatctccgctcactgcaagctccgcctcccgggttcacaccattctcctgcctcagcatcccgcatagctgggactacaggcacccgcccccacgcccggctaattttttgtatttttttagtagaggcggggtttcaccatgttagccaggatggtctcaatcttctgacctcgtgatccactcgcctcagcctccaaagtgctgggataaaataaattcttagggccgggagcggtggctcacacctgtaatcccagcactttgagaggccgaggcgggcagatcacaaggtcagaagatcgagaccatggtgaaaccccgtctctactaaaaatacaaaaaattagctgggtgcagtggcgggcgcctgtagtcccagctactcgggaggctgaggcaggagaatggcatgaacccggaaggcggagcttgcagtgagccgagattgcgccagtgcactccagcctgggcgacagagtgagaccctgtctcataaataaataaataaataaataaataaataaattcttatacccacttgcattatttattattattattattaaacagggtcttgctgtgttgcccaggttggagtgcagtggcgtgatcatgacctcccagtctcgacctcccagtttcaattggtcctcccttctcagcctcctgagtagctgggactacaggtgtgcgctgcatgcctggctaattttttttttttttttttttttgagacagagtcttactctgttgcccaggctggagtgccgtggtgcaatctcggctcactgcaacccccggctcctggattaaagcaattctcctgcctcagcctcctgaatagctgcgattacaggcatgtgccgccacacctggctaatttttgtatttttagtagggacggggtttcaccatgttggtcaggctggtctcaaactcctgacctcgtgatccacctgccttggcctcccaaagtgctgggattacaggtgggagccaccgcgcctggcatgcctggctaatttttaaaaaatttttgtagcagccgggcgcggtggctcatgcctgtaatcctagcactttgggaggccaaggaggtcgggagttcgagaccagcctgaccaacatggagaaaccctgtctctactaaaactacaaaattagctgggcatggtggcacatgcctgtaatcccagctactcaggaggctgaggcaggagaattgcttgaatctaggaggcgggggttgcagtgagctgagatcgtgccacggcactccagcctgggcaaagagagtgaaactccgtctcaaaaaatttttgtttttgtttttgtagcgacagggtcttgttttgttgttgcctaggctggtactgaatttccagcctcaagcgatcctcctgcctcagcctcccaaagcgctgggagtacaggcgtgagtcactgtgcctggcctccacttgctttggctgcctttctctgtcttaggtaaccatacatttctccaggtaattaagaaaagattgcgcatgatgagtcccttttctggtatttctgggattgcccccaaaaccagacaagtgttcttaccttgacattttattaagactttaatgaacagaatgccgtttgccctcagtctgctggtccccctgcgaaggcccagggcttccttgtttgaaaagtcatccccttgtcgaggtctttgattccttttcaccacggcagtcatgccgagggtccacagagccaccccttccccatctcttcctcggcccctcaagacgcatctgtacccccggagatgtctctttgttttcttgggccacctctcctggccgtcactcaccctgctgactcattacttgtgcaacagtttcttctggaaccctcaggctcctgccacctaccctctgcagtccccgttttgttcctcttgcctcagtcttcctccccatcacccctctacctgttggtctccatctctgtctatggcacatccctgtgttatactctgatggctggataaaggttgagtgaaacgcatctacccctttggtgactggggtgcccattaatcagaagggatccaaggctggcgtagccttttcccgcatcctggggtatcgtcctgtggctcttccttgttggagtctgcagttttttgtttttttttttttaaattttttgagatggagtctcgctctgtcgcccaggctggagtgcagtggtgagatcccagctcactgcaacctccgcctcccgggttcaaccaattctcctgcttcagcctcccaagtagctgggactacaggcgcccgccaccatgcctggccaattttggtatttttagtagagacggggtttccctacattggccgggctggtctcgaactcttgacctcaggtgataggctcgcgtcggcctcccaaagtgctgagattacgggcatgagccaccaggcccggccgttgagattaccttcataagccaccaggcctggctgtagttggcagtttttgaccactggtctcgctccacgtgatctgtgatcttccccttggccccctggccctgccctgttcatctgctcacctttctcatgcatgcggtttgttcatagggtatgtaatggggtctaaccaggaaatggaaaccgcttgagcatttatttatttatttatttatttatttatttatttatttttcccaagacaaggtctcactctgtcacgcaagctgaagtgcagtggtgtgatcacagctcatggcagccttgaactcctgagctcaagcgatcctcccttctcagcctcccaagtagctcggactataggtgcacactatatgcctgcctaattttttcttttatttttgtagagacagggtcttgctttgttgcccaggctggtcctgaactcccaacctcaagcaatcctcctgcctcagcctcccaaagtactggagctacaggcatgtgccatcacgccttgctaatttttgtattttttgtgtgtgtgtaaagacaaggtcttactatgttgcccaggttggtcttgtactcctgggtttatgtgatcctcctgcctgggcctcccaaagtgctgggattacaggcgggagccacagtgcctggtccacttgagcatttagaacagaaggacttaaaggcggggaactagttacacagatgatgggagaggtgaaggccagacagggaacagagaggcaatcagcaggaaatcaaagtggtgtgggcttatacagccctctaaaggtatggatgcaatgattcatttagaatgagaaaataaataacagcaaattataaattataagcagctgttaaatatcacaaacatcactacatgcagaagagtaccagtcaactgtcagtcatatctccaaagttctatttctcccacatttttggcattacttcttcaatatgatgactttgtaatatcgttttctatttcgagaacagaaaactgatcaggctggacacagtggctcgtgcctgtaatcccagcactttgggaggccaaggcaggtggatcacttgaggccaggagttcaagaccggtccgggcagcgtggcgaaaccccgtctctactaaaaatacaaaaactagcagggcatggtggcatacacctgtagtcccagttacttaggaggctgaggtgggaggattgcttgagcccaggaggtcgaggctgcagtgagccgtgatcatgccactgcactccagcctgggtgagagagtgagaccatgtctcaaaaaaaaaaaaaaaacaacaaaaaaaaacataggctgggcgtggtggctcacgcctgtaattccagcactgtgggaggttgagatgggcggatcacttgaggtcaggagtttgaaaccagcctggtcaacatggtgaaaccccatctctaccaaaaacataaaaaattagccaggtgtgatgacgcacgcctgtaatcccagctacttgggaggctgaggcaggagaatggcttgaacccaggaggcagaggttgcagtgggccaagatcgtgccattgcactccagcctgggcaacagagtgagactccatctcaaaaataaataaataaataaagcgaatgaatctccttagttgatcaaattttgtttttatttttggtagttgggatgtatacaaaagtggcggtcaacatggagttggtggtgctgctacaattgttttgttcaagatacacaggaattctggtaaatcctgtttttttctttttttttaaatgtgattcccatcaagaaagaagtaggaaaatgggggagatttctaactgcatatgaggcatttgtgcatgtatttctgaccagagagacttttctgttttgactccacattgaaggaactgaatcctttgcttacaacttcacctctggtgatgggagtaattttccacagatttgcttctggacccgtgcatttcaaatcttgcttctctccactgcgcacgtttttccggcgccaggcaccgcaggatatgttcgtgtcttgtgatttttgattctgcgcggtaggtggaattggaacggtgagtggagcgagtattgctggaatccgtttccacaccgggatagcgagcagtaactgaactatacatggaaataaatgggaactacataaatataacccgaccaaagccaaactaaatatctttccagttcaacttctccttagcaggagcccccacgtggcagcaagcctccgtttccacctcacacaagagaaaatgtgacgggcaggaactcaagactggaaatgaacggggacgttaattgattgtagggaaaatattttccattttgtaaattttacaaaaaatgtttgaccctgtggacatgtggttagggcccttctcagtgccttgagagggaaccatgcaggtagagggagggttcttagcattgtgggggtgacctggagattggcagcagggtgccaccaccacccctaggtggggatgagagggaggaagtcctgtgaccagagtccaggggccagagtcacctgctgggagcccaaacaaaggtgggactctggcaggagctggaactacacagaggaccacctctcctgctggagaagctgtctgaggcagaggaggtggagagctcccgcgccctcccttgcttccacctcccaggttcctcccaagcctctcgttggttgaacccagcccaaagccagcaggcctggggacctggacacctgagccagcagaggtcggcgtttctcccacacaaaggagggcacaagaagtgggaggcacggagggggatcaggccaggacccacacaggatgtgcaaacaggagctcccctctcttcccaccccaaatggcatctgcagccggcctcacttccctgctgttagacaggaagaggaaccttgttcccggcaccagctgcccccaccgccccccaccccacggaggcccctttcctctctggcctttgcttgcaatcattggcgacgctgatggaccatatcttctggggagtttggtcatgaacatggtttcccatttgttgtggaccaaactgtgcccttccccttgaattcctgcgttgaagccctaactcccaatgcagctgtaattgaagatagggcttttagggaggtaattaaggttaaatgaagtcatagggcaggaccctaatctaataggattgatgtccttataagaagagggagagacaccagagatctctcctcccccctcacttgtaaacagaggaaaaatgacggaggacacagcagggaggtgggtacaagccaggaagaggggcctcgccgggaactaaccctgacggcaccttgatccgggactttgggcctctcaaactgagaaatacatgtctgttgtttaagtcactccctccacagtaatctggatggcagcctgagcttaccaaggcaccgtctgcatcagccagggctctccagggagacagccaataggagatggatggatggatggatggctagatagacagacaagcggacagagagagagagagacaggcagacacagacagacaggcagacaaatggctagatagacaagcagacagagagatagagacagacagacacaaacaggcaaacagacaggcagacaaatggatagatagatgatagatagccaggcaggcagatagacacagacaggcagacagacagacagacagatgataggttgggttcagtgactcttacctgtaataaccagcacattggtaggctgaggccggtggatcacttgaggccaggagtttgagaccagcctggctaacagggtgaaaccccatctctactaaaaatagaaaaattagctgggcgtggtggtgcatgtctgtaatcccagccactcgggaggctgaggcacgagaatcacttgaacctgggaggtggaggttgcagtgagctgagatcacgccactgcactccagcctaggcgacaaagtgagactccatctcaaaaagaaaaaaaagatagatagatgaatggatagatagctagatagatgacagatggatgataggtagatagataattgataaatagatataaatgaccgatggacaggcagacatagatacattgattaggtagatgatagatggatagatagaagatagatggtggatgggtgggtagataggcagatagacagttagaaagatagatgatagatagataggaaggaatttattaggggaattggctcataccattgtggaggccaagatgtaccacagaaggccgtccgcaagctggaggcccaggaaagccagtatcgtggctcagtccaagtctgcaggcctcaggactgggaagctgttgatgtaactcttagtttaaggccaaaggtttgagagcctggggaactgctggagaactgggagttctaagtccaagggcaggagaggaaggcatcccacctccaggagaaagagggaattcaccttttctctgcctttttgttgtctggcaatggaatggtgtcatccatattgagggaggatctttaccactcagcccaccaactcacatgcccatctcctccagaaacaccctcacagacacacccagaagcgatgcgttaccagccatcccttaatccagccaaactgacacctgccgtcagccaccacacaggctcagaagaatcgtggttgcatggtgatggtctccatcccgtctaaagaagttgaagatgaactgttggcacaagccatcgttctttcaggctccttccagtcgttcattcttttaaaaatgtattcattgagcacctgctgcatgccaggtgctgtgacaagcactggggcacagcagtgagcaaacaaggactcttgtttcttggagtttacatgcagtagaaggaaacagaatcaatgaattcatcagttctagaaactatcaaaataggactaagagctgtggtgagaattaagataaggtgattgcatagaaagtgactgatggctgctttggaatgagtggtgaggggtcacagagatgatgacagctgagttgagattgggaagacaggaaggagccagcagtgcaaggactaggctggaagcaagcttggtgcattccaggaacagcaaggaggccagaggggctgcagtagagcaggcgaggaggaggagggagacgcaggtcaaagaggagcctggggccagatggaggaccctccctccaaagctcagtcatttcctccttaaaggagaatgtgttacctccaaaagtcacatatgccagcacagtgtctggctcatcatatgccttcagtaggcggtgagcatggctgttcttgttattactacatcacaattactaggaataatggagtcaccaggctttgcatttacagcaatgtgagggagtcagcaagcttccctggggaacccatctcccctcactaagttcataagagcctgataaccaggtcaatgtagtgagagctatagctgcccagtgtactggactctttagccacgggccaggacactttcatctcagcagaaacctctaaggggactggggagtgtgctgtggatgtttctgggttactcagacctcctggggagccttccccaccgcagctgctgcagggagctcagctgcagtgatgaactgcggctcagccttgtttatgggaaaaccctacatgggagatgggacggtttcctgttggttctctcggcctcaggttgctttcacaagtgcagggattctcacctgggtgtgtgaatggggctcaggatgccccaagggtatgtggagatgggggtcagctgtcttctctgatgcctctgaacctcctccccctgcctttctgcatctcattgcttcctggcctctctcactttgggtgctttggaacaacatgcaatccaatacacaggctgactttattattttgttttgttttattttattttattttggaaacaaaggctctgtcattcagcctggagtgcagcggtgcaattgcaactcactgcagccttgaacttctgggctcaagtgattctctcgcctcagcctctcaaagtgctgggattacaggcatgagctgctgtgcctggcctaggctggctttaaaagctcctcactctctctgcatcctgatgatacctacctcctggagcaggctcccagccattggcttcggatactttgtagctattattggccagttgtggcatgtgaagctgaggctcaggagaagggcagtcctgtccaaggccacacggctcagtgctaacactcagacttcagtgtttttatctccctcctggtcgcttccacccttagtgcatctctggaggcccaagggagctaaaggccaggctttggtcagctaagaatttaaaaaagctgtctctgtgctcctctgtcaatccatcactccattatctcccccgacaatgaattcagtttgaatttcagataaacaaggattaatttttagtataagcatatcccacaacagacttgggatatacttatgcctaaaaatgattcattgtttgctggccttagtagctcatgcctacaatcccagtgctttgggaggctacagttggagaattgcttgagtccaggagttcaaggttacagtgagccatgatcatgccactgagctccagcttgggtgaagcagcaagatccttatctcttcaaaaaattgttgattgtttatctgaaatccaggtttaactgagcatcctgtattttatatgagaaccctatataggtgagacccagagtcccaatgcccactggtaagcctttgcagggaggctctgtgggtccttggctggcactgatgccctgtgatgagcagggccatctggcaaggtggacgcctgctgcccatgcaggcagagcaaggccctgggcaggtatgagctgatctcaccttccccagcctgggagccagatactgttggcagcttgccgtcaagagaggggctggtcaccaagagaggggcggcctccatgggccttctttggcttttggctctcccccagccctcctcctaccccaaacagaggccaacggcaccgcaccagaaccagtgtgctgcctcctttggttggcattttgtagttgggtagactgtttccttctcacaggagctggtggtgccccttccgcttcacagggaggatggctgagacccctgaccttgacacagggtgctgttctttttttgttttgagacagagtcttggtcttttcacccaggttggagtgcagtggcatgatgttggctcactgcagcctccacctcctgggttctagcaattcttctgcctcagcctcctgagtagctgagattacaggcgtgcaccaccactgagaacaatgccttctacagtgtttattctcctgtaggagcaagttcctaaggcaaggaggttgctcccctcatggatgaataaattgactttgatccacagccccacgtgtcagccttgagggtggggaaaggttgttctgtgtctaggcagggggtgggggcaaggccaggagggcctggtgcccagtgtacctcttcaggacacaactccaggtagcagaggccaaggacagaggggaggagaagagggaggtggccattatctccttatctcagcttcctttggagataagcttgagtattttagttgtccactaagtctggagataagtctggaatttaaacctttgactttgatccagcccttcacagctcctgtgagcaaactgagcctcagaaaaagggagtgaagcctgtgcatcctggacgcccccaccccaggctcaaaccgcccccaccccaggctcaaaccgcccccatcccagctcaaaccgcccccatcccaggctcaaagcgcccccatcccagctcaaagcgcccccatcccaggctcaaagtgcccccatcccaggctcaaagcgcccccaccccaggctcaaaccgcccccatcccagctcaaaccgcccccatcccagctcaaaccacccccaacacaggctcaaaccaccctcaacccaggctcaaagcacccccaccccaggctcaaagcatccccaccccaggctcaaagtgcccgcaacccaggcttaaagcgcccccaccccagctcaaaccgccctatcccaggctcaaaccgctcccaccccaggctcaaaccacccccatcctaggctcaaaccgcccccaccccaggctcaaagtgggaaggagccacagggaaacaaacgggggaggcacggatgaccaggatgagggtctccatgacccacctttccccaggggctatctcaagagctttttaaacttttattattttttaatagagatggggtcttgctgtgttgcccaggctgatctccaactcctagcctcaagccatcctcccacctcagcctcccaaactgctgaggttacaggtgtgagccactgcacctggcctctctcaggagtttcaagaaaaaaaatgggaatagatttgtgtgtgtgtgtgtgtgtgtgtgtgtgtgtgtgtgtgtgtgtgttttgagaaagagtttcgctctgtcacccaggctggagtgcaatggcacgatctcggctcactgcaacctccgcctctcgggctcaagtgcttcttctgcctcagcttcctgagtagctgggattacaaacatgcaggctgattttgtattttcattagagacggggtttcaccatgttggtcaggctgatctcgaactccggacctcagatgatttgcctgccttggcctctcaaagtgctgggattacaggcctgagccaccgtgcccggccaggaatagattcttttctgtagatgacttctgtcattattgaaaatggatgtttatgcacaattgaattgtcataacgcctcatcctaaaaagctcctttttgagaaaatgtgacttttgatagaggagagactgtccaggcctcattcattgtcagcacaaaggcagagcaggggtgtggcggtgtcaccctcctctgagacagccccatccctgctctgcccaggggttcagaagtctggtctattcgagcccacagaggggtttggagtggctgtcttacatcacaggtggggtctgtaaggatctgaaatgacctttgagaaggcgggtgtggtgggtgcatttcaatcattaaagtaacaacaatgatacatcaaatagtgtctgctcagattctgagtgcctgtttaaacatttccatcttgtgacttgccagattctagcataacaacccaggtaaaagaaaaaatagctgggcgtggtggcttgtgcctgtaatcccagcgtgaggccaaggcaggaggattgcttgagaccaggagtttgagaccagcctgggccacctgagaccccacctctgaaaataaacaaaccaataaaagaccttcatgctctatgtctttcttatatctaggttccccaaattatatgcattggggaaagtccattaagagaagcccctggccgggcgtggtggctcacgtctgtaatcccagcactttgggaggccaaggtgggaggatcacaaggtcaggagttcgagaccagcctggccaacatggtgaaaccccatctctactaaaaatacaaaaattagccgggcgtggtagtgcatgcttgtaatcccagctacgcaggaggttgaggcaggagaatcacttgaacctgggaggtagaggttgcagtgagccaagttggtgccactgcactccagcctgggcgacagaaaaagactccatctctaaataaataaataaagggagagaagcctctgggctcctagatacatgggtcagtgtccacccctgcaaagctgctgtgcccaaagaggggctgtacttggtggaattggggcaaaagagcagggagggcactgggcagttgacctggtctccactactggaaaggggctgtgctgctggtgccctgagctggttccacaaggaagacactgcacagggcgccctaagtttgctctttctgcctaggctcaccctttcctctccaggaccagggagccccgctcgtctcctgtcttcggcatctgctctctggcttgtgagcactgcatttctttctgcttggaacgccggcccatggtgggtccccggactcctgccttctgctgtcttttgccatatctcgtcaaagtgtgttttatttatttattgttattattttttgaaacagagtcttgctctgtcgcccaggctggagtgcaatggtgtgatctcggctcactgcaacctccgtctcctgggttcaagcgattctcctgccttggcctcccgagtagctgggattacaggcgaatgccaccacgcccggctaatttttgtatttttagtagagatggggtttccctatgttggtcaggctggtctcgaactgacctcgggtgactggcccacgtcagcctcccaaattgctgggattacaggcgtgagtcaccatgcctggccaactattataatattgatattataataatatcacagccagataacggtgactaacgcctgtaatccgaacactttgggaggctgaggcaggcagatcacctgaggtcagttcgagaccagcctggccaacgtggtgaaaccctgtctctaccgaatatacaaaaattagccggagcgtgatggcaggtgcctgtaatctcagctacttgggaggcggaggttgcggtgaactgagatcgtgccactgcagtccaacctgggtgacagagcaagactccatctcaaaagtagtaataataataataataataataatatcacttattgagttttaattttgtgccaggcactgtgctagtacttgcgccatgtgacctcattgactcggaacaacctatgagtaagcaccatctctgtccccaaggaagctgagactcaggaaatggaagtcatctcccagggcccacagcaagggcctggcgaggtctgcgttcaaattctgatcatctgactccaggctttcctgcctcctttgcctcccaaaaactcaaatactttcatctgggatgactccagacagctagatttcaattgtcttctctccttctgagtatgttttattttaaaatcacataaagataactcacttctcaactggagccacggaatcgttagatgtcttggagacttttctagctacctctttgctggactcagacacaggcctgaataattaggtccaaggagctgaactggagccgctcgtggccagaggtcccttcctgggaacagcagtggcggcagcggctgcgctgagcctggcaatttgttcaagagcaggggatgctcaggctgcgctcgcccccttcttatgaacggtttgctttgcgtcttctctgtgccaagggctgccaggcaccagatgcccattttaggaaatcagaaaaataaacagtgtaaataaaacaaaaactccacccaagaaatctgagacagatgctgttttccccaccgtttctccacccccatgctgggtttggagagagtgggccagcatgtttcctacggataagaggccctggggtatttaacctggatggaacctcttctattttccttttgcctggtgctagggggcagaaggcaggggtggtgtccatctggcccagggaggaggatagggcagcctttgtcgccggcatcccctgcagagatgtctcagccagaagtgactccatcctcaggaacgtgtgtcctgttctttgctgggcggcccctccttaccccccattgtttccacagtggggtgtgctagatttatgggcagagttctggttcactctcagccccggacagcagaatgtcccagtagtgcactgatggtgtgtgcgtggggatgtgtggaacaggggatagtgaccccgtgtgcgttatatgcagtgcggcttccagtcgggtgtgtgaagggggtgctcatggccatcgtggaagtgagctcagctggggctggagggtccaggctcactgtatgccactcagcagccttgggagtggggttcatcctcctccccgctcctctcccctcctggtcctgggcagcccaccggagctgcactctgggccatctctcctggtcttaaggaggctgtcatttctgggaggcagatgctggcccttccatccttgcttcctggagatctgcgccgaggtctgcctttctgtctggagggactggccaggaacccctgggttttcctggtggggtttttgttgcttagcagtgagcagagtgagtgggcaccaagaggaggatgctgggtgaggtcacggacatggctggggcaggctgggggtgctggaggtgaattccgcagctgtgcgaccttgggcagtttgcccagccctgggcctcgcttcctcctctatgaaatggggcgggagcacctgcctgctggggttgtgggttgggtgaatcggagctaaggtacagctcacagcctgccgtcagaccctcgcaagcagaagtgggtgtccctgctcagcgtcctccggtccctccttcaaggctcagctttgtcctcatctcctccatgaagcctccctggttactccaggagtcacgacccacaccctctttggagccttgtgtcacacgcatttctcacggtgttgctttccctggaggatgggttcaactaaaattggggcccatctgggggttccctccagcaccagagaagctcaggcttagtagagatgggtaccctgtcaatactagttccgcgaaggatacactgtgctcattctgctgccagttgctgagtctggtgtcctgtagttatggaacatgtgtacaggcctgggctgctggacacgaaggccagatgggcagttcactctgcctccgctctgagcctttagaaacaagctggctgcacccatttccatctggtcacagtttaggagtggggttgtggaatggatggaaggaaggatgagtgggtgggtgggggggtgggtgggtgggtggatggatggatggatgatgggtggatgggttgatggatgggtggattaggtggacaggtgaatggattggtgggtgggtgggtgggtgaagggctgaataggtgggttgggtggatgggtggatggatgtgtggaggggtggtggggtggatggggtccatgggtgaatggatggatggatgggtgaatggagtaaatgagtgggtggatggatggatggatgctgcaagagcctttctggagggttccagggaggaactggcatctttgaccagcagccagcatggtgatcagatacagggaggtgtctgggtctgcctgatcccttatctcactgttggtgggactgggctggttatgtgtccctgaagctctctgaagggtggctgtatggcattgcccaggggacatccccagagtgccgtgctctacagcaatagggtggccgcctgtgctcccagggccgctcctcctggcagcctttcgggtttgcttggcttagcacctcagcaaatctcctcgagttaggacttgcctgccatgagcctctccaacaagcagccccaggccaaggcctgtgtgtgggcagagggagcgcatgccgcgggaggctgcattaatctgaggttctgtttttgttccctcctggggcaaaaggtaaaaatagcctgtcccactccatccccaaatccagcccggctgcacccagccctgggagtgaagggggctgggtcaggactgcccgtgagttgtagaccctggtgtagggaaaccctgattcataagacgggtggacatggaggaaggaggagactccgtccagcagagacacgcttgggtgcagcccagcttggagtctgatggacgtgggctcacctgtgtgcaactctcattcactgtgtggccacagggaagtgacactctgtggagactcagattccttatctgcaaaacaggggtagtagggcttgggggaggatgtgtgtgaaggtttggcccagggcccctccagcagccagacagcagtggctgtcatccctccagcgtccagggttacctgggggagtagggcctctgtccccagatgggccccgtttctggctctggaactcacagcaggagcaaaggcgaggacattcctggtgttaatcatccacccggagggagagcgccagtggccttgtgtgacctttgccctttgtctctgtctttaggaggcacgcggacctccagtggccggctccggaggcttggtgactccagtggcccaggtaggtggctcgctccgctctggccccacccagctcatgggtgtgtttgtgctggggtcccttcattctggtctgggacctgcctccccacctggcttccctggatgagtggggccacttgcccatttcccagggagacgcagtctttgacggctttggactcaggtggcttccaggcctgtcgacgctgccctgctggagatgatccttgtgggggcaggggcagccacccccaggctcagggagcaagcccgtgtgtgcgggacagaggagagaacaggagatagatagggctggatgatttggtttgagatgctgaggggacagatgtgccatggacaggtggctttggccgtgagcctctcggtgttggttcagtatctgtgggctccctgcaaccttgcaggatggaagatgctccaggatagagcagatacgtccggtgttatctaggaggaaataagtgggcctctggcagtggtcactgtgctactccttgtgctttttccatgtgtttggaaattttccacactaaccagtagggaagggaaacagatgcacccatcagagctctggggctggccgtccaggacacgagttacagcttataggcttgaagggactctaccaacactgggtgcagcctgggcaagggagtgggacagagaggtcagggctctgcctccagcccttgccccccagggctgagtctgcgcgtcatcttctccccactgggtgtccctgatctcccctgcctgaccccagtgtggccatgctagtgcctctgtttctgggagcctacgttgttcttggctgtcacttccagcggccaggctgggacaggtgcccatctagtggcttttctatttggagaggatgatgggtcacagcaatgaatggacttacctcccctaggagacgaggagctctgagaagagcagagatggcgtggtcacctgtgcatatgtgctgggggccaactgggtgccagacccctggctgccatcatggtggcagacaggcagggactgtgccttcatgaattagccattctagaggagacaaagttaccaaaggacacggacccggagtcaaatccacacaaatagagcgcctgtggaccagggctgccttcagaacaaggtgagacagccgtcctgccaggacaaggcgcctacgggggcaagggcatgtgcccatctggagccgccacctccatgctctagaccagctccgtctaatagaaccttctgtgatggtgggtctgttctatacatctgcactccgccatcctgtatggtagccgcttagccgcctgggtctattgcacactcaaagtataaatgtttacgtttactttattcactcatttacttgcatagaattatttatttattttaaatggatttccacttatatctacgtgtggctagtggctatgaaactgaacagttccagaccacactggcacctgagacctcagaattctagacccaaagcctgcttctgatcctgagcttgcttctgtggggacagcacagacgcctcctaagtctgccttccagaggtggatgcagtgcccgtggactgtgcaccaccaggcctggacagtggagagggtggctttttacagggagtgggagtggaggggatgccgtgtccacattgagtgcatgtgaggccccttgcagtacaggatgggactgtatgtgggaagaggggggtgatgctctggctggaggcccctgggcagctgcatgattcagcgctgtggttaagaggggctccgcccatcgcagtcatgttgggcactaaccactggacagcccagccgctgctgtgtttctggggagcttttctccggctccgcatctgatctgcctctccatctccttccctctcattggccagcttctggtggaatgggtggggagggtcccccagttcttgtgggggttgcatcttgggaacctggcaccctgggctgcatggacacagcctcccccggcggttgcttccctctgctcagactggctggttctgtgctgtcagcacttggcagccacgatcacagctcagcttggaagcctaaggcataatttgctgaatcccaaagctgcaagctggtgatctgggtttgcgtgggactgcctgctgacacacggggtcctccctctgtgggcctctgtgggctctggcccgagacaccctttcctcatcttcttggcttctttctttctccctgcctcccttttgctaagaccctggtccaggcaggagttcattcctagacgccccagcatctccggcctccccatttgacactccccagacgactgtctgccatcccatcctcccagcccagcttctctgtagatccacatctggccaatctcctatgtctgggactcttgccctccccagaaggacgaaggctcttctcgaggttgtgtttgggactgggccagggatgacatttctggcaaaagcttaaatgacaccatgatcaacgctttggtcagctcacacactttctttccttttaaaaaaaaaatggaattcttagagctacaaaacaaaaatgtaaagaataaggtaataaaacacctgtgtactcaccatcccgcttaagaagtgagacattgcaggtgtagccgcagccctgggtgaccttctccatcctagccccactcctgctgcggtgcccgcccctctggattgggatctggccccgggcaggcacatctgtgctgggcagtggtgtgtctgagaagcctaggtctccttttttttttttttgagatagagtctcgctctatcgcccaggctggagtgcagtggcaccatctcggctcactgcaacctctgcctcctgggttcaagcgattcttctgcctcagcctcctcagtagccaggattacaggcacccgccaccatgtctggctaattttttttgtatttttagtagacacagggtttcaccatgttggtcaggctggtctcatacccctgacctcaggtgatccacctgccttggcctcccaaagtgctgggattataggtgtgagccaccgcatccggcctggtctcctcttgcatacggtcatcagcatcgtgtgactgagcagcctaggtctgtctcctcttgaatgccgtcatcagcatcacatccttggtgcctcactggagtcagtggctgccctgcctgtgcccacaacgtgacggcgtggagacttatccgtgtagatccacgaagccttggttcacttattttggcagctagcgagtgttcctctgtgtggggaggcagagtttgcccgtcccgtggcccactggtgacatcgccgaaggtcttctctgttactagtgctgccgggaacgtgtgtttccccaggtggatttggctgggctgtggagatgcgcttctcagcccttctagatgttaccaccacgccctcccgagtggccttctggtaggctctcccatgttcgctcattttctgtgcctcaggcagccgcctctctgactgagcgtccagcggacttttgccctgtttcccacggtgcacggagcatttcatctcagtggtgcctgagcttccctccctctggccctcagaccccggctgggatccttggagccaactcctctgcctgacatcccgtgtcgctaggtcctgctcttccatcttccaatacctctggggtgtgtggccttttccccagtgcccccatcatcccttctgtcctaggttgaaccgtgtcccccacaaactcatgtccaccaaaaacctcagaatgtgacctgggagttggagatggggtctttgcagatgtaagtagttaaggatcttgagatgaggtcattctggattagggtgggccctaaatccaacaactggtgtccttaaaagaagcagagaggccacagacacaccggggagagccacgtgaaggcaggagcagatgatggagtgacgcagccccaggccagggagcgtctgggaagaggcaaggaaggaccccccccccaccccaccccagagcctccctagggagtgtggccttgctgacaccttgattttggacctctggcctccagcatgggagagaacccgcttccattttttcaagccccacagctgtggtccattatggcagccacaggacactgatgcacctcccacctggccgctgtggatggacgaccccgcccgcaggaagtctccctcaagcactgcaggtgtctctgccctcacaggggacgcctgcacaagtaggtgtgaaaaaagggccctgtgggggcaaggcctgggctggtgctcgctgcctcccttcatcctatgctagttcccatgcctcttccggcaggagtgcctggctccacctggtgaatcagagccaaactctcctgacaattggctgtcacttatttaactgccaccatccccaggagacagaaaatgccagaagggtggggcctgtgcagtgcctcctcgctatttccccagggcaccgtgccacgttgcctcaatgcacagagtagctgctcaaagtgtgtcggacgaacaggtgccccatgcccagccatgcagacaaaagtgtgccacgtggagggagctggtcgtggaagagaccaccagcatcttggctgcccgaggaccttgcccctgggctcttgcaggcacccctagttcattacttcctctctcacccatagctacccactcttcctctatttctctgatatcagccttgccacccacccaggtttgcaagcaggaaatctcagagttgaccttgacctctgcctccccagcacccccaggtctcaacaggctgccaagatctcatcaactcgccctctgcatactgacccttggacaggctgccccggtcacggtcatgtcttggttgggcctccatcatccctccttggaccagcaggtgccatcctccccacccctgccctgctgtggctccttcccctccacggccaacatttagaggacgattaccacttccctccctgtgtgctggggaccgggtgataggatccctccacccgatcatttccattagacctgggccgggtcttcttactcatagagcccttagtttccgcccccaaagcctcgagggtggattcgtgctgccgcccagcctggccctgataccgctttccagcctggagccccctgcttctgcgctcctggctctgagtgctcgggccccccctggatgggttgccacttgtcctctggaaagcagggcttccatgctcctggacctcctagctgactcagtgactttgggccatcttgtcacaccccttctatcagcttggccttggttatttctgtgtcctccatagcctcggaccagagccacggcgggatgctttcctggtgcgtggcaggcagtcaggaaatattgctggactgaccttgataggagatgcttgggagaattgcccaaaaaactagcttaaaatgcaaatattggccttcttttgcgttggctaaagagtagcatttctccgtttgcctcccgggtaagaaattgatggcgaatgcaatgtctctagggaggagaagaaggtgacaaaaagggtctgtataacggggcacacgctaggcatttgtgactatttaagtttaaattataacataaatgcgaaactctttgccttggtagcccttccacattgcaagcgttcactgccacatgtggctgccatattgactacggcagatacagaacattgacatcattgcggagagttctatgggggggcgctggtttagatcatcttcacgttggatccacaaattcattgtttatccagtgaacggttactgggcacctactgagcaagcaggatgaaagacacccgctctcgggggagtcttccgttggctgcagagaagcttaaactcaggggacctggggcaaactctgcaagggcccttggcctctgcacccccagacctccctcgctctgcaggggcagtcgggggccccctctaggaatggagcgccagctccagctcctgtcaggctacagcccagatggttggctgagcacgagcatgtgagagtggaattgggcccaaccgggctgcttctccccgttgtcttggtttccttccacgctgacctggaaggactcctaaagcaacaggcctgcccaggcggtttgcaccagtaaaccctgcagcggccccaagggcagagatagctggattgtatttatttaggaacagccaaagtctgaggcacaataaaaagtggagaaagattccagagaggaatgcagctggcctcagcctgggaatccgtcttgcttgggaggctgtaggcgggccaggctggggccagcctggagggtcttggctggctctgctggcaggtacagtagcagggtcagcaggagggagtccaggacggagctccttcatttttaattcagggaagcaaacttcagtggttgagtctgaggatgagcaggaaatgaatggaaaagtcttttttttttcttttttctttctaggcagggtctttctctgtcccccaggctggagtgcagtggcacaattatagctcactgcagcctcaacctgccaggctcaagggatcctcctgccttagcctcctaagtagctgggactacagttgtgcgccaccatgactggctaattcttaaaagaaatgttttcaggctaggcatggtgacccatgcctgtaatcccagtacttttggagccgaggtgggaggatcacttgagctcaggtgctccagaccagcctgggcaacatgacgagaccccgtcttgactaaaaatacaaaaagttagctgggcgtggtggtacagccctgtagttccagctacccgggaagctgaggctgcagtgagttgtgatcacgtcactgtcctccagcctgggcaaagggagtaaggccctgtttcaaaaaaaaaaattttttttttttttgaggtggagtcttgctctgttgcccaggctggagtgcagtggcatgatcttggctcactgcaatctctgcctcccaggttcaagtgattctcctgcctcagcctcccaagtagctgggattacaggcatgagccactgtgcctggactttttttttttttttttttttttgtagagatgggatttctctatgttgcccaggctggtcttgaactcttggcctcaagtgatcctcccactttggcctcccaaagtgttggaattacaggtgtgagccaccacacccagcaggaaaagtcactttttaaagcgagaggttgtgcgtcctctatagcttggcgctcatcagcatggaggatttactggaacgtgtgttaggtgaggggacatggaagatggcagcaaatccgagcccagagcatcagaaagcatgctttcagccaaagatgcgttctctccacctccgcgcagcacccttccccagtgtgtactcctggagcaaggtggggccgatcctacgaagaccctttcccgaaggcccctgctgcccacatcagtgtcacctggaccgcctgctcccttttctggatggctggaccagccccagggcctcctggcctggtgtggggagcacagtccaccctggggaatgcctggtatgtgtcccctccccactgggtaccaggggatgaagctgtgcttcgtggaaggggacagaggcgctggtgcccaggatggtgcacctggggcggctgaactggacctggctcctactgggcccctgtggagcccagattgttgtgagaaggggtggggaaaggcaggtgatccgcacctttcacttttgtttcacatgggaacaggggcttatcctgcacacatattcagtttggagtatgaatttccatgaagaggaaaatctctattaggctctgatgtcaggattgtccgtgagggccgggccgtgttctggggcaaggacaggagtggagggggcaaccagggaaggcttcctaatggaggaggcatttgatagcatcttgaaaaagaagcagttcctaggccaagccagagactgaagaatgaccacctaacttcttttttttttttttgagatggaatctcgcgctgtcgcccaggctggagtgcagtggcgtgatctaggctcactgcaacctccacctcccaggttcaagcaattctcctgcctcagccttctgaatagctgggattacaggcatgcgccaccatgcccagctaatttttgtatttttagtagagacggggtttcaccatgttggtcaggctggtctggaacccctgaccttgtgatccacctgcctcggcctcccaaagtgctgggattacaggcatgagccactgcacccggccacgaccacctaacttctttctacaagatgccccctggctgacgcaaagcaggttgagtgagtgtgacacttccttcctgtctgtgggttccggcctttccagagcccggccagtgctattggagacaaagtggccttcgctcttccttcccgccctgccaggcccagcctgtgccgctgagccccactttgcaattaagaggagctgtgaaccagtgatgctgatgtcgcagaaaagtggccaggggtctatggggggtgaaggacagggatgccgccctgagaactgtctggaaggggcttttgggtaacagtgcccactccagggtgtgggcaggctggggtggctgggagctgggctcataggctggcacaaccagagtttcccaaagccgtgggcctgagggccctgccttcctgggacagcaacctttggtccaatttgggaaaaggtgggttaaaccaagcccggctccctcactgtaggattactcagtgcgtttagtatgcaaatgtgcctctgaatctaagacaggaccacagaaacctcttcagtgttcctctggagggagggaccgcgggggatccaccgcaggggcctgggtctgcactggcctggtgaagtgcccccttagtgcttacaccatgcgcggtgagaggttggccctcgcctcccccaccctctgctggccttacctcaccacctctgcactcgcctcccagccggctcatgactaactcctgcctcttcagagccaatcggtgctgccaggttttccatttcaagtgatcccccgcctgggccaaaatgtttggattttcaggcacggaggggagatggacctcaggccaaaccatgctgggtaaaactgagggtcaaggctgtgctcagcaagtgctccagccctggccgtcaaacccatagtgtgcacagcgtgcaggaggtggctgggtgaatgaactcagtcatagcccggcccctcactcggggctgttcccaagttcccaccgccagccaggctgggtcagagcctcgtggggccttcctgggcttccctgccccacagcaggagttcgtatggagagtctcgagtgaggttaatgggttttcttcctcttctttttttttttttttaatttgagacagggtctcactctttttacccagccagggtgcagtagtgcaattatagctcacagcagcctcgaactcctggcttcaagcaatccttccgccgcagcctcccaaagtgctgagattacaggcacgtgccaccttgcccagctggggtttctgctttttactttttctcttgtttctaaactcaatacaaagaaagatattacatttataatcagaaaaaccaacaaggaatattatttcaaaattggaaaagggattaaagaaacaaaccaagaaacctctgcgattcctgcccatcggagtcagtggttgttagtggttggcttaacacaatgttttaggaagaaatagaataacagaaagcaactccagtgagctgagccctggctccgtctgtggcgctgcatcagtttcctgcagctgctgtaacgagtggccacaagctggctgggtcacaacaacgcccagccatcctctcacagctctgcaggccacacatccgagatcagggtcaccaggctgaaatcagggtgtccactgggcatagccctctggaggctctagggcaggggttcccagccccgtgtgtcctattaggaactggcctgcacagcaggaggtgagtgactggcaagcgagcgaagcttcatctgtatttacagtcactccccattgctcgcattactgcccaagctctgcctcctgtctgatcagccatggcattggattcttataggagagtgaaccgtattgtgaacggcacatgtgagggatctaggttgcgtgcttcttatgagaatctgatgcctgatgatctgtcaccgtctcccatcaccaccagatgggaccgtctggttgcaggaaaataagctcagggctccaactgattctacattatggtgagttgtataattatctcattatatattataataataatagaaataaagtgcacaatcaatacaacgtgcttgtggccgggtgcagtggctcacacctgtaatcccagagtgaaactctgtctcaaaaaataaaaaataaaggccaggcacagtggcttatgcctgtaatcccagcactttgggaggccaaggctggcggatcacgaggtcaggagttcaagatcagcctggccaatatggtgaaaccccgtttctactaaaaatacaaaaattagccggacacggtggcaggcgtctgtagtcccagcttcttgggaggctgaggcagaagaattgcttgaacccaggtggcggaggttgcagtgaactgagatagtgccactgtactccagcctgggtggcagagcgagactctgtctcaataaaataaaataaaataaaataataaatataatacacttgaatcatctcaaaaccatctccccactccctggtctgtggaaaaattgtcttccctgaaaccgatcccaggtgccaaaaaggttgggggccactgccttcatcgcctgcccctttgagcctctggtggctgtgggtgtcccttggcttgtggctgcatggcccttaccttcaacaccagcatctacagatctctccgggccccatctccacttggccatccctgtctgtgtcaaatctccctctgcccccgtcttgtatgagcaccgagactgcctttagggaccacctagaccatccagggtgctctcgccacagcaagatctgcaactgaatcacagatgcaaaaactcttgttccaaacaaggtcccatttgcaggtctagggattaggacatgctatccctggggccattattcagccttctctcgtgactatgatccctcccttcctccccagcctcccacctcggctgagatgctgtccccacctccctcactgtctggctgcctgtggggctgtcctccaggctctttgggaggaggtggttgcttgatgtctcccagaaggctgggaatggtcctccccaccccccaggaagatgtcctttctgccaaggagattgcatttggggtcctatcccaggcagagagcggacgggactgtggcctgaagtggcacttcagggcctttggctctgtcatctagccgagggctgtgcatgggcctcacctggtcacaggtaactcacctggctctgtggggcagggattgtaaactcagaggcctgcggggtgtgtcgaggtagaggggtgcaaatattgtaaatttgttgggggccttggggagcagcacagactgaaaagtgttttgtctgaagagcagaactgtcttataccagccctgtgcggccaggcaggaaggcttccgtggtgcggccacgcgtcctccctttctcaacagaagctgacagtctggagttttcagagagattgcctgagttctcagccttggcacaaacacacattctctttaaacaggcttgggccaacagaaccagcctccgtgtctcgggtttgaatgaacccttgaggtgaagcttaaagacagagaggatgcccctgattcccaccccagggacccacattgtaaacccccacctgctctgctgagcccttggcctcagcatggaccctgaccatgtgctggtggggaccccccaggtaagtaagcagcctctgaggaccccggatgaacagtggggaacagcactgatcccccagtggggccccgagttcccggagaggaagactcgctccctcccaggggacggctagagactcactgactcatgcgtgtgtggtaggaatcttccaggaagtccccgtcccgttcgccctctctgcctgggcggggacggcaactgcctctgtcactgcagactaatgggacggaggggggtgacttctcagggttcctcctgggcaggtgctccggaaccttttctcagcacgctggcctggggcacggccgttcctcctgcccagccacgttggggtacagggtgaagaagggctggggccagcccaggacagaggaaggcgaggcaggcacgcaggaactgggctttttaaacccttaagcccaaggaaatcgtagcatcgcgggacagggaaaatgaaagactttggaagtcgtcaggaatttgactctgtgagttggtttccaagagtctaagttaagcatctccaagtggatattaaaaaggagcagcaagcctcggggcggcgggggctggaggaggtggagagaggaggctgccggaagccgcactcgggacctctgcagccaccgaccagaccgggcggccgggactctgggactctcgcaggcagacccggtggtctgccggactcctcggggcccacttcgggccctctctcctgcctcctatttttggatttctctcctttgctccctttttcctcccgttttgaagagacaatgctacttcagtttggagcacaaacatatgatcagcacatggaaatgtggtaattcggatgcattcgtgattgcaacagattgaagaaattagaccagacaaagagtgtttttagaggaggaggaggaggaggaggaggctgagagagggagggcgacgggggtgagaaaggggaggccgcctctgagcgggacgccgggactcccgccgctgctaaatatatccgtaggaatggagagggaccggatctcaggtacgcagacagccccctccccatcggccgccccccactgccctggactcggggctttatttatgcctgggggaataagcatgcaaagggcgcttttgctcatttttcacagaaatatttcttttctttttgacggttccaagctcgtgggatgaactccgtctcagaagctaagctctcctgagtctggcttttatttaaactcggctctcctctctcctggctacttccctttcattttccagtgtgccattcttgcatgtcatggccactgtcaatgctgaggctgttggcgccgaaaccttgggagggtgtgggggacctgcccccctggctcgggtctggggcggcggcgcttggacctggctggtggttggtttgtccactgtgtggtttgttttttgcttccagccaaagtctgtcttcaaggctgcctcggtctcctacctaaaatagcatttctgtgccttcctggcagttgattatagagggggaagctcccggcgctcagaggagcctggcgtgtgtgtgcacgtgtgtgtgcatgtgtgtgcgtgtgtccattcacgctggcagcccccttgccgcaggcacagacccatcagggcgtgaacaggcaaatgaagagaaagggggctcccctgcctttagttcaccccagctttccaggccctccctcccaggcccagcctccttggtcccttcactcacatgcggtgccgtggctgccatctcacgtggccagcgccgtcatcggtaattagcagtgatgacagtttctgccgctcatgccgccctctgagcccagcgctgggagacatggggtggctgagccaagctccaggctttgggtattctgaagtgacctacgggccatggagcgggaggtcgctaagagtgtcaacccctacgtgccttgggccctggtctgttggttgccactatgtgtgtgttggggggtccctgagaggcctgagagagggaggcccatctcggtggctcctctctaggacgtgtggtcccctccaccactgctcccagggccacatctttttttttttttttctttgagacggagtctggctctgttgcccaggctggagtgcagtggcgcgatctcagctcactgcaagctccgcctccctagttcatgccattctcctgcctcagcctcccaagcagctgggactataggcgcccgccatatttttttgtatttttagtagagatggggtttcaccgtgtcaaccaggatggtctcgatctcctgatctcgtgatccgcccgcctcagcctcccaaagtgctgggattacaggcgtgagccacggcgcccggcctcagggccacatcttgattgtcacgttgggactggtggagcgggtgtgtgttgtgccgctgagcacacccagtcgggcacagcaggcggacctcaggagggggccaggggagacggcagaaggcttgggtggcagtgaaactgcatcttatctgtttgagctcgggggctcaggcccgctgggacgggtgggtgtggagcccagcgtcctgctctccgcccagcaggagccgcagggcagggagcgctgagagggaccttcgtcaggcttgcacagtggagccgtcctcggagtgaccaccccaccaggcagcctgggcagaccacagtgggtcccctgcctcctgggccaccagccccaggaggacgtcactccacccgcctggctggcaggggcctcggggagcctcgggttcggccttcactttatagatgatctagccgaggcccagatgggtgaccagcaggggatctgagagctgagcagagaggcgtgggtttgggggtggtgctccctggggagctggaagtgatggcaccctcccaggctcacaaaacacgggcttttcatgaactgaacaaaacactctttgaaagcagccagtgctgtgccccagagaccactctgatccctgctgcccttggctgaggacagcacagccagggatgaagcggggacctcccctcgggctgtgccttgatgaaagatgctttctacaaaatcccattcggatgtgttttcatgtaagaaaacgtacatttttagaaactcagttgtaaactggctgccttccgaatgaacacgacagtcccggagctgtttcccttaatgaggttctcgtcctgggcaaactttagcgctggtctttaattgtcactgaactcccgcacagtccctggggaagtgacttccttcctgtccctgctgggtggccttgagcaagccacttggcagctctgggccgcagttccgtcatctgcaaggtgaggggtgggagcggcacggcccctaggcagcgcccccacctcctgcgggtttctgcgcgtgtcctgagttttgtgggcgcctcttccctcactgaggggctcttcttctctgcagggcatggctcacgccgcgttgtcaggctgcaagccactgcgagagctgctctgatccccaagcatgctctggcctgaggaggagccatggggaggacgctgtgcctgtgtgacagaggcctgcccggcagatgccggcccgctgacttccagacgtggctgtgggtgcctcatgccccactgggctggcgtgtgaggcgtgtccagctcaggctgccctacagctgcccaggaagggtttgtgggagggggtggtcctaccctggtgagtccacggtggtctgccagccccagggaaggcttaggagccccaagacctgccctcttgtccctccctcggcagtgtctggctccggtctggtttgtgaacgggggcctgggtactctcccgccctccctgggggctgtggccttcccctgggaaggtgctggagggtttgtcagcagggccggcatgagtcatggagtggtgactggccgctgaggcatggaaggccactccttccagccaagggtcggagctttttttttgttctggaacggctttgtggcttttacaaattaagcagttttatcttgttccaagagcttgtatttcagcagggagagagtctccaagaagggaactttccactggggagctctgttgggctgggaggctaggaacaggccacgagggagggctgcaggcaggggaagtggccgtctgtgcatggtcatgaatgcaggcccggggtcctggagggggcttggccacgctgtcgctggacgtctgtccccaccagggtccatctgatgcagtacggcacagggtaaagcccagctcctcttacggggttcctgggtcatcagtgggcggggaaccgaggcctcctggagggcggtgcctcagccctcacccctccctcctgtccctcgctgtgctgtccccgatggcctctgccatcccctgggagttcttacccctggacgctcggtgcctgtccggtctcaacctctccagctctgcttttccatctccgaggtgagaggcctggcctgacgcgctctgcacccgcttcctgcccagccccgtgggaactctggtccctgtagtggtttcctggggctgccatcaccaagtgccacaaactgggtggctcaaaacaccagacatttcttctctcgccgttctggaggccagaagtccgaaatcacggcatcagcaggcctggttctttccggaggctccgagggggagcctgcttctcgcctctggcagcttctggcggctcccgaaacccttggcgttccttggctcgtggccacaccactcgacctctgcctccgttgtcacggggcctccttctgtgccctaaatctccccctgtctgtctctcatacggacagtctttctcggatttagggcccactgggtaacccaaaatggtcccatctcaagatccttaacttcataacgtctgcaaagaccctttttccaaataggccatgttcataggctctggggtggatgtaaattttaggggccacctttcatccccctgttgtccccgtgtgtctggatgcacagcatggttccatgtcccagactccttgctggacccctctggccctttggggtggcctttggccttttccactcgtttctgtgctcctggtgaggtgtcggggtcgggcttagcccctgcaggaattctggggacagcatggagccggcaactccccaccaggcgtcttcctacctgcccagagctcatggttgtgaggggtctctccttgtggttttgatttgcaattccccagtggttagtgatgttgagcatcttttcgtgtttattgctcatttgcacatattcttgcagaaatgtctgtccaagtcctttacctgtgtttgatttggatgattgttgttgctgagtgttaggagatctgtagattaatatccagatactaatcccatatctgacctatgatttgctgccattccatggattgccttctccccacgttgttagtgccctttgatatgcaatttttttttttttttttgagatggagtctgactctgttgcccaggctggagtgcagtggcatgatcttggctcactgcaacctccgcctccctggttccagcgattttcctgcctcagcctcctgagtagttgggattacaggcacccgccaccacacccagctaatttttgtatttttagtagagacggggtttcactgtgttgactaagttggtctcgaactcctgacctcaagtaatccacccgtctcggcctcccaaagtgccggagttacaggcgtgagtcaccgcacccaggctgatatgcaaatattttaaacttctatgacgttccactttatctatttgttcttctgttgcctgtgcttttggcgccatatccaagaaatcattgccaaatgcaacgtcaggaagcttttcccctgtgttttcttctaagagttttgtggttttagctcttgagtttaggtctttgatgcaagttgagttgatttttgcatgtggtgtaagggctggtccagcctcatgctctgggctcttgattcacttctcttcttttctcacgcccagctggttccgctgggtggcggggaggagtggggaagtcccgggctgggcctgcactcgatcatcccctctcaggccagccagggagtctcagctcctgcccaggacctggctggacgtgctccctaccgggaaagcctgggccgtctttctaggctgatggcagggccagcccggggcgtcctgaggcctgccctgcggacatgccccttgttctaggtggtgtggctgcccggcctgcgtgtgagaccagctgtctgtgcttcaggccatggaggctgagtgtttccagcctgtccccttgctcggctctccctctggggaagcccctgcagcccattctctgcctccgcttctgccatctgtgcctttgtctgcttcctgtttggaggtggtcatccctggggccacccctcatgatctggacacaagtctccatcctgaagccaccacccaaacccctgtgcctcaaacccctcccacccaccacatgggtttccactgtgaccaactcagcagctgatgaagcttcccttggggctctcctagcaacggggagctggctttcccggaggcctggcctctccctaagtggaagtggggcgtgagggtgtcagcctttttctgctgcctggtgctctaggttggcttgtcacccctggaagcacttgccatccttatacagcaccccacacccacctccccgcctcctaccccttcttccaaggggtcatctctgcttccctccccacccaacctcacccatgtggtccgcccagcaacctttgacccccaacatgacaaaataaacctcccttgccggtcactcattcattcattcagcattgggtgctccctgtggacttggcgctggggtcccgtggaggacaaagccagacacagtccttgccctcatgggactgcacaagtgcaagaccacatcagtaaacgtgaaacacaggaagtgacaggtgtgacaaaggggaccagtggcaggacagaacctgcggttcgtaggaccaggtcaggagggctgcctcggggggacaccttcgggctgagcgcagaaggatgaggggagtaaaccaggctcaaacccagcaggcagaggcgatcgctgcaggcaaccggcaatgtgttcaaaggccctggggcgcggggggctgaggccggcagcacggcaggaagtaagactggggttgaaagagactgactgtcatgttgtgaaatatacacttggttttcatctccatttcctggcacacaactcctaaaatccttggaatctccaaagtgatgtctttttggatgctcatgattgacagaccagctggcagcttcaggatggttcccagggaagaccaggtagaatcacaaggttcagcaccaccccgcaacctccaggtaggggagaggggctgaaggttaagcagatcatcagcggccaatgattgaatcaatcatgccttcgtaatgaggcctccgtgaacactcagaaggatggggttccgggagcttctggatggatgagcatgtggaggctcctggagggtggagcgcctggggagcacatggaagctctgcgtccctcccccataccttgccctacacatctcttcccctgtatcctttgtaatatcctttataataaactagtaaattccatgagccccaggaacatgtgtaaaagaaaaaaaaaagaataaaccatagctgctgtagcaagttaatcctaccagcactggctctcatctgccgaccttacctctggcaatgcctccctctcctgggctcctgggacccctccggccccaccacccctcctgtagtggtctcgctggctgctgccctcaggttagtttatttttacccggcctgctcccaccaggggctgaggcctccttgctcactccagcttcctggcccgtctcttgctctgggcacccccccactccgaacggccagagcttctgaagccgctcgctgtgtgcccccgcctggccccatgcatcccgcacggtgctccccagggtctcccactggcaagggcattggcatagattctggggctgccttggttcaagcccaccctgacttggagcctgagggtccctgagggggtcctgaaggccagggcaggcaaggctggcatgctctgggcagtgggggctgggtatgggaggggatcgtgggtggggagattcctcttaaccagcggcccacgtttggagactgatttgggctccaggctacgccttgaaattgggacagagagtggcgcagatctcagcccggagactccctctgcctgtggacgccctcatacctccatccgtggagccaccctcctctttttttttctaaatggggaaactctgacttgaacactgaataaacaacacaccctcgaaatcagcgaagaggcactggctctgaaactttgccatgaaagcttgaaaatgctctttggaccgatttgctggaacagacgggtgtgatggggctgcggggtttcaggtggcaggaggcgtccccgtgcctagggcatcccgatgctcagagtttccccgtgcccagtgtgtccctgtatccagggcatccccatgcccagggtgtccccgtgcctagtgtgtccctgtatccagggcatccccatgcccagggtttccccgtgcccagggtgtccctgtatccagagcatccccatgcccagggtgtccccgtacccagggtgtccccgttcccagggcgtcctgtgcccagggtgtccccgtgcccagtgtgtccctgtatccagggcgtccccatgcccagggtgtccccatgcccaggcactgcctctccccactttcctaatctccctccaccaacaggtgtcagctgtgaaatgcctgctgtgtgtgtcctttggttgagttcatcttgtgctcttaagttcctgttagacacaggcaggctgctttagttcttctggcaaatgttttgttgttgttgtttgatacggggtctcactccgtcacccaggctggagtgcagtggcgccatctcgcctcactgcaacctccgcctcccaggttcaagcgattctcctgcctcagcctcccaaatagctgggatgacaggcgtccgccaccatgcctggttaatttttgtatttttagtagagatggggtttcaccatgttggtcaggctggtcccgatctcctgacctcaagtgatccacccagcttggcctcccaaagtgctgggattacaggcatgagccaccgtgcctggcccgtctggtgaatgtttattgaggcctactatgtgcagcccctctcttaggtgcttggcctgtaatgaggagcaacaaagacacagtcgctggtcgcttgttacttaacagttggaactgagaggcagtccacaaatgagcaaatccataggtggttttagatgaggactgtgaagaagctaagaacaggttgctgggggtgcatatctgtgtgtgtggcgaggggattaatggaagccctttctgagtggtgacactgagctgaagctgtaatgaccagaaggacccagccaggccaaaatccaagggaagagcaacctggcaaaggaaacagcaggtgtgaaggcccgaggctggagcctggggaaggtgggagtggctggagtgtgttttcagagacgggccatggtgacaccaatgcgacaggcagggccaggtcgtgccgggccttggaggccctggtgagggcttgattttattctcactatggtgggacctcagtgccctgtggctgctgagaatggccaggggcaggcagggaggcctgctagggaggaggctgctgcaggccctgcagctggagagggaggatcaggatctctttagagaggaagttggagagggaggatctctttgattgctggatggacccacctgcctggctgcccccgtcagcatccagcagaggccactggatgctgacaggtggccggccctgcccagccttgcactgccctgtgctgccctggtggctgccggctttaggaggagcgcttttggtgtctgagcccagtggtcctggctgtggtttggtacacttggccgtgggtgaggccaaggtggtttggatcctgggaaggttgggtacctggcagcctcaaggcaggagctggggtgttggaggaggaagcacgctcatccctcgttccttcctgtttcgtgggatgctgagtctctgggcagggacatggtgagccctggtgtgatgcacttaacacctgctggtgcccccatccccaagcaggaaccctggtgcctggtgcctgaggactgctgtccaccgtcccaccatccttcaggtttcttcccagcctctgactcggggcaaggttcagatatccagaacattcttggctggctcttggagctggggtgaggcagaacctccctcccatatttacagcaccagccaaggcttcggggtttggacaccatccctgggaggggtgagcaggacaagtgaggtctccagacttggggtggcttcggactggccaggcaggtgggtgggggctgcagtccatgcccccgctccaggcaacacagtcgagctgcagcccccgctccatccccagctggggctccctgtgctcaccttctgcttccttcctctccctcggaatggggggtggacactccaagactagcctcccagccactctccctgcctcctgcctcctctccttcgggacagacccctgtgatcgctgggtgttcctgatgctctgtcccctctgcgtcctgtgccgtgggtgagagagggcttcggggggacttccccctcttggagcacctgctgctccgggtgcctctgggggcgggcccccacctcacattgtggagctggtgtaggaaggaaggtgccgggagccagctccaattcacgtgctggctgtggccctcaaggtgtggatggcaggaggtggtgagacagggactcattgatcatgggactgacaccccctcatgttgatgtgggccctgagccataatctcaccagctcctgagttttggcgctgctcttggcgatggcgtggactcagccaggctctcgggcagcctttcctggattcttcctccgttctcccctgggcagtgtttctgttcacctggaaaggatgggtaggacttggagacaacagggattcaaagaagtcgggagtgggggcacctgtgcagctcaccctgcagaacagacaatttggttaaagcctaaagcctgctgtcaggagcctcgcttgcctctcagagagcacatggcttgaccatcacggggactgggggagaggcacaggcatgcctgtccggcagcagaagggaaccccgggcctgggcctctccattctgtggcgttgtctttcctcagagttgcactgtctccttcactgtccctgcctggccccagtgctcatgtggcttgtggccctcagtctgggcttggtctcccgcaattcaccctgcccagccccacacagcttgtccctccagctgggaatcggagctcacctggagtcccaggcagcagattcgatgcagtgatgcagggctgtcagccatgccagcaggccctgctgctcacagagggatgggtattgctgttgacaataattaaagaactacggcttcaggctgggtacagtggctcacacctgcaatcccagaactttgggaggccgaggcaggagaatcaattgaatccaggagttccagaccaggctgggcaacatagcaaggctttgtctttacaaaaaataaaaaataataataataataaaaactacagcttcagaatgattgacttcagcatgtttataaagtcaagggtcttcagtgtcctgggcctatgtcactgcgtcagagggagagaggaagaggctggggtgatgggcactggggcttatgctcctcctggaatgggtggtcttggactgtgcctgtgtgatatgtttgtcgagcgggggcggtgtccactgaggactggatgttgaggtgtgggtggggggaggttatgaagcactgggcatttcccgtgcaccagtgccccgagattgcagagaggggacccgcccagcctgggcagggaggcgggtggcagcgaggaaggggagaggaactcgggtgcagaaagcctttcctccagcaggtggcgccgcaagctctcgagagtccagctcctgcggggtttgcattttcactgaatttgtgggcagaggctgcctgggtgtagtttccgccaactgtgactgctcactgcgggcgaggggaagtggagtgcagagaatgcaccggagggcagatgaccagcccccgcacaggcacgggggtgcctccttccccgcacaggcacggggggcccgagcccttggggttcctgtcctaactgggcggggaaagggagggttggaagctgagttagggggaaagggggtggtctcctgccatctcttttattttatttttcctatttttggttgataggtttcaatcttttttacatttttccaactttttgccgtaaaacttttcaaacatagaaaagatgaaagagggctgagtgtggtggctcatgactgtaatcccagcactttgggaggttgaggtaggaggatcacttgagcccaggagttcaagaccagcccgggcaatatagtgagatcccatctctataaaggatacaaaaaattagtcaggcatggtggtgcaggcttggagtcccagctactcggaaggttgaggtgagaggattgcttgaacctgggaggttgaggctgcagtgagctgggattgtgccaatgcactccagcctgggcgacagaacaaaaccctgtctcaaaaacaaaacaaaacaaaaccacaaaaaagaaaccatgaaagattctaaagtaaacacccatgcacctaccacctagattccacagcaaccattttgctgtttgcttcaccacaaatccctctggccaccagcatccacgctggttttgatgcacttaaaataagctgcagaaatcagcacacaacatcctgtcaacacctcagtttgcatttcattaactagagtccggcatttgtctgtgattatttttgtttttctttgaagtaaaatgtatataccctgagatgcacaggtgtgaaacgttccgttctttgaattttaacaaaggtatccacgtgtatcccagcctgaccagaacatagaacatcactatcaccccagtaagttcctcatgcccctccaggtgcatcacagtccccaccttccccagggcaaccacaattgtgctttttttccaccacgaaataattttgccagtttgagtgtttcttagagctacccatgttgctgcaggtgccagcgatttgttctgttttattgctgagtaacgtccactgtgtgaacattctgtgggtttttagtcattctcttgttgaaagacccctggctgtttccatctggaggctcttatgagtaaacctgttacgctggttcttcttgtacaagtttttctgtgcatatgggcgttcatttattctgtagaaacacctagagtaggtatagggtaggtatacatttagttttataagaaactgccagatcttttcccaaagtggcccttccatttcacactcccaccagcaatggatacgagttctagttgctccacatcctggccaacatttggtgctgtcactctgtgaaatcttagtcattctggtgggcgtgtagtggtatcatctcattatggctttaatttgctttggcctgatgactaatgcggttgagcacattttcatgattggctcttcatatatttttcctttgtgaaatgtcttttcaaatctgttgctcattttaaaattgggttgcttgactttttcttctggatactgatcttttgtcagatacgtgttttacaaatattttattccagtctgtggcttgcctgttcattttctttcctttttcaagaacaaggtctcgctgtattgcccaagcaggtctgaaactcctgggctcaagctgtcctcctgcctctgcctccccaagagccggttttacaggcatgagccaccatgcccggcctgttcattttcttagtggtattttccaataagcaaaagtgtgtcactttaatttttatgaagtctaatttaacaaactcctttctttgtggttctctctctgtgttctttgtaagaaacctttgcctaccctgccaaattgcaaagatatttatgttttcctttagaaggcttagagttatatagcttttatgaattaacttttgcatatggtgtgaggtagagggtcagggttcattttgttgtcgttttatgtgtttattcagttgttccaaacttcatttttttttaaagcttttattttgtattttcttggtgacttatgaggtcgcacaattttccaagatccttgttggtcatttacgtattttcctttgtaaaattatctgtccacgtcttacttctttttaaaattatgttgtttcaagatcgagtgatttctgaagccttcattttataatgcttgaaagaatgaacaccttgttccccagctacaggcttctgctctttgtcctgcagctgcacagtggggtaagacttgggttttgttttgttgctgctttgttgtttcttcatttgactgtttccccatgggtctcatttaaaaaaaaaattggccgggcacagtggctcacgcctgtaatcccagcactttgggaggccgaggcgggcagatcacgaggtcaggagatcaagaccatcctggctaacacggtgaaaccccatctctactaaaaatacaaaaaattagccgggcgtggtggcgggcgcctgtagtcccagataatcgggaggccgaggcaggaaaatggtgtgaacctgggaggcggagcttgcagtgagccgagattgcaccactgcactccagcctaggtgacagagcaagactctgtctcaaaaaaaaaaaaaaaaaaaaatgttgtttcatatgttttttatatattctggatataagtcctttatcagatatatgtatcataagtttttttttccacattgctcctttccttttggttttcttaatgatgttatttaatgagcaagagtattttgttttcataaagtccaatttatcaactttttccagtttcgatttatgatttttgtgacctatggaggaaatctttgcctacactaaggtcaaaagaagttctcttattttctagaaattttatagttgtatattctatgattccttttattttttaattttttaaatttttacattttttaacctattatagccgtcaggatgttgtatgatccattttaaatcagtttttgtatttggtttgaggtcagggttaattcttgtttttctatactcatatccagttctagcaccgtttgttgaaaagacataccttactctattgaattacctgacacctttgctaaaaatcattgactgtatatgtggccctatattagtatatgtacgtatatacatgtaggccctgtgttgactgtatgtgtggtcctatattagtatatgtacgtatatacatattggccctatgttgactgtatatgtggtcctgtattagtatatacatatcagccctatattgactgtatatgtggtcctgtattagtatatgtacatatatacatgtaggccctatgttgactgtatatgtggtcctatattagtatatgtacatttatacatgtaggccctgtgttgactgtatatgtggtcctgtattagtatatgtacatatatacatataggccccgtgttgactgtatatgtggtcctgtattagtatatgtacatatatacatgtaggccccatgttgactgtatatgtggtcctgtattagtatatgtacatatatacatataggccccgtgttgactgtatatgtggtcctgtattagtatatgtacatatatacatgtaggccccatgttgactgtatatgtggtcttgtattagtatatgtacatatatacatgtaggccctatgttgactgtatatgtagtcctatattagtatatgtacatatatacatgtaggccctatgttgactgtatatgtagtcctatattagtatatgtacatatatacatgtaggccccatgttgactgtatatgtggtcctgtattagtatatgtacatatatacatgtaggccctatgttgactgtatatgtggtcctgtattagtatatgtacatatatacatgtaggccctatgttgactgtatatgtggtcctgtattagtatatgtacatatatacatgtaggccctatgttgactgtatatgtggtcctgtattagtatatgtacatatatacatgtaggccctatgttgactgtatatatatatgtggtcctgtattagtatatgtacatatatacatgtaggccccgtgttgactgtatatgtggtcctgtattagtatatgtacatatatacatgtaggtcctatgttgactgtatatgtggtcctatattagtatatgtactgtatacatgtaggtcctatgttgactgtatatgtggtcctatattagtatatgtactgtatacatgtaggccctgtgttgagacactattgtgttttcttgatattttgtccattcctttgctgatgccacatcttgattaatgtggctttacagtaagtcttaatataaagtctctcaaatatctaaaatattactttgaatattctaggtcctttgagtttccttataaatttaagaagtagcttgttgatgtctacaaaaatgcagtgtgaattttggttgagattgtgttgaatctgtagatcaattaaggaagaattggcattttaacaatattgagtcttttgtatagatggtatatctccgttttaaaggtccttttgtatttcttttatttctctactgaaaaaaaatctctacagaattacattgttttgtagttttcaagaaaaagatcttgcatgccatttgttaaatttattcctaagaattttacttttggcactattttaagctgaaatagattttaaatttcatttttaattatttgctgctagtatgtaaaaatacaatagatttttgtatgtaaatcttatatcctatgatcttttccaaagtcatttattactctggtaatggttttgtaggtcttttaggatttaaatacatagttttacttctttctgatcttgatgccttgtttttttttcttgctttattgcactggttagagctgccagttcagtattgaatagtagtgattagtggacatccttgcctgtgccaaacttataatgttaactttagatttgtcatatatgacctttgtcagattgaggaaattcccttctattcttaatttgctgaaattttttaacatgaatgggtatgattttagtaaatgctttttctgcatctatggaaatgatcattgttttgtcttttattcgtttaataggataaattacaatgattgatttttgccccccgttttttttttttttttttttaaagaaacagagtctcactcttgcccaggctgtagcacagtggtgccatcgtagctcactgcagcctgaactcctggacttaagcaatcctcccacctcagcctcctaagtagcagggactataggcacatgccaccatgccaagctaatttttaatttttaaaattttttgtacagatggggtctcattgtgttgctcaggctggtctgcaattcttgagcttaagcaatactcccacctctgcctcccaaagtgctgagattacaggtgtgagccactgtgcaggcctgattttttaatattgaaccaaccttgcatttctggaagaagtccaacttgcttatgagatatcatcctttttatatattgctaaatttgatttgcccagtttttaaggatttttgcgtgttgattcatgagggatattggtgtggtattttctttgtttgttagtttgtttcggtaatgtctttgtcagcctcattttggcttcataaaattagtttggaagtgttcccttctctttgttttctgtgttttcataaggttgatgttgtttcttccttaaatgtttgatagaatccaccaagaaaaccgtctggacctagaattttctactaggaaaggtgattgtttgtttttaatcacaaattcaatttaatgtatagaaagagttattcaggtttttttacttccccttgtcttacttttggtaagttgtactttgaaggaatttgtccctttcaggtaagttgttgaatttactcatttaaagttgttcgtaatacaagcatacctagggtttgcttccagacctcggcaataaagcaaatattgcaataaagcacgtcacacaaactttttggtttcccagtacatataaaagttatgtttaggccaggcatggtggctcatgcctgtaatcctagccctttgggaggccaaggtgggcggatcatttgaggttaggagtttgagaacagcctggccaacatggtgaaacctcatctctattagaaatacaaaaattagctgggtgtggtggcacatgcctgtagtcccagctgcttgggaggctgaggtgggagaattgctcgaacctgggaggtggaggttgcggtgagctgagatcacaccactgtactccagactgggtgacagggcgagactccatctcaaaaaaaaaagaaaaaagttatgtttacactatactatagtctattaaagtgtataagatcattatgtctttttgctaaaaaatgctaataatcatctgagccttcagcaagccataatctttttcttggtagaaggtctgcctcaatgttgatggctgctgaccaggtggtggttgctgaaagttgaaggtagctgtggcagcagtttctttgtttcttttttctttttctttttttttgagacagagtcttgctctattgcccaggctggagtgcagtggcacgatttcagctcactgcaacctctgcctcccgggttcaagcaattctcctgcctcagcctcccgagtagctgggactacaggtgcctgccaccacgcctggctaatttttgtatttttagtagagacagggtttcaccttgttggccaggctggtctcaaactcctgacctcaggtgatccacctgccttggcctcccaaagtgctgggattacaggcgtgagccactgcacctggccggcagtttcttaactgaagtttttgacatgggttgactctttctttcatgaaagatttttctgtggcacgcattatgtttgatagcatcttacccacaatagagcttccttcaaaattagagtcaattctttcaaccctggccacggattgatcaaataagttgatgtaatattctaaatcttttgttgtcatttcaacaatgttcacagcatcttcgcctggagtagatcccatctccaggaaccactttgtctgctcatccataagaagcaactcctcatctgttcaagtttgatcatgggattgcagcaatccagtcccatctccaggctccacttctaattctagttctctgctatttccaccacatctgcagtgacttcctctgctgaagtcttaaaccgctcatccatgagggttggaatcaacttcttccaaactcctgttaatgttgatatttcaacctcttcttgtgaatcacaagtgttcttaatggcatctagaatggggaatcctttccagaaggttttcaatttactttgcccagatccattagaggaatcactaactatggcagatactgctttataaaatatatttcttaaataataagacttgaaaatcaaatttatcccttctccatgggctgcagaatgggtgttacattagcaggcatgaaaacaacattcatctttacatacatctccgtcagagctcttgggtcacaaggtgcattgtcaatgagcaataatattttgaaaggattcttttttcctgagcagtaggtctcaatgatttttttttttttttgatggagtctcgctgtgtcacccagaatggaatgcggtggcatgatctcggctcattgtaacctctgcctcccgggttcaagtgattcttgtgcctcagcctcctgagtagttgggattacaggcacacaccaccatgcttggctagtttttgtattttttgtagaaacagggtttcaccatgttggccaggctggtctcgaactcctgacctcaggtgatccacctgcctcagcctctcaaagcattgggactacaggcatgagccactgcaccgggccctatttgttttttttttgttgttgttttttaattgagacagagtctcgctttgttgcctagactggagtgcagcagcgctatctcagctcaccgcagcctccgcctcccaggttcaagtgattctcctgcctcagcctcctgagtagctgggactgcaggtgtgcactaccatgcctggctaatttttgtatttttaatagagatgaggtttcaccaccatgttggccaggctggtcttgaactcctgaactcaggtgatttgcctgccttggcctcccaaaatgctgggattacagctgtgagccaccgtgcttggcccttttttgtttttttgttttttttcaaattgagacagagtctccctctgttgcccaggctggagtacagtggcacgatctcggctcactgcaacctccgcctcctgggctcaagcggttctcctgcctcagcctcccaagtagctggaattacaggcgtgtgacaccatgcctgaataatttttgtatttttagtagagatgcggtttcaccatgttggccaggctggtctcgaactcctgacctcaagtgatccccccgccccagccttcaaaagtgctgggattacaggcgtgagttgccgcaccaggcctcaatgggtttttaatattcagtaaaccatgctgtaaacagatgtgctgtcaagtagggcctgttattccatttctgaagcatagacagaatagatttggcagaattcttaagggccctaggatttttggaacggtcaatgagtattggctttaacttacggtcaacagctgcgttagcctctcatgagagtcagcctgtcctttgaagctttaaagacaggcattgacttctcccctctagctatgaaaatcctagatgacatcttcttccagtagaaggtgggacatctatgctgaaattctgttgcttagtgtagccaccttcatcagtgctctgagctagatcttctgggtaacttgctgccgcttctccatcagcacctgctgcttcaccttgcacttttacattatagagatggcttctttccttaaacttcatgacctgacctctgctagcctcaaactttccttctccagcttcctcacttctcttagccttcataccattgaagagagttagggctttgccctggattaggcttttgtttaagggaatgttgtggctgatttgatcttctatccagaccactcaaactttcttcatatcagcattaaggctgttttgctttcttcttcttcatgtgtgcactggaatcgcacttttaatttctttcaataactttttcttggcattcacaacttggctagctatttggcataagagatctcacttttgcctgtcttggctttcgacacgccttcctcactcagcttaatcatttctagcttttgatttaaagtgagagacgggtgactcttcctttcacttgaacacttagaggccattgtagggttattaattggcctaatttcaatattgttgagtctcagggaatagggatgcctgagcagagggagagagagcggggaacagccagtcagtggagcagtcagaacatacaacgtttattgaataagttcactgtcttatctggatgtggctcgtcatgccccaaaaacaactgcaataatggcattgaagatcactgatcactgggcgcggtggcccatgcctgtaatcccagcactttgggaggccgaggcaggtggatcacctgaggtcaggagtttgagaccagcctggccaacatggtgaaacctcgtctctactaaaaataccaaaattagccaggcgtggtggcgggtgcctgtagtcccagctactggggaagctggggcagaagagtcgcttgaacctgggaggtggaggttgcagtgagccgagatcacaccactgcactccactgcactccagcctgggcaacagagcgagactccatctcaaaaaaaaaaaaaaagggccgggcgcagtggctcacgcctgtaatcccagcactttgggaggccgaggcgggcagatcatgaggtcaggggattgagaccatcctggctaacacgatgaaaccccgtctctactaaagatacgaaaaaaatagccgggcgtggtggtgggtgcctgtagtcccagctactcgggaggctgaggcaggagaatggcgtgaacccgggaggcggagcttgcagtgagccgagatcgcgccgctgcactccagacagagcaagactctgtctcaaaaaaaaaaaaacaaagaaagaaaaaagaaaaaagagatcacagatcaccatagcagatataataataatgaaaaagtttgaactatttcaagaatcatcaaactcctacacagagacacagtgttaacatgttgttggaaaaatggtgccagcagacttacttgatgcagggctgccacgaaccttcaatttgtaaaaagtgcagtatctgtgaagcacaatgaaatgaggtgtgcctgtgttccttgtcactgtaatgtcggtaggatccgtaaggaaaacacttcattccttttattgtgactttatgttcgccatctccctctcatcagcagcctggctaggaggttatcaatctagatctttttaaagaaccagcattggactccccttttctggtgtccatttccttgagtttctctgttatcttcattacttccttccttgtacttgcttcagcgcattagtcagggcccagtcaggaaacaaaaaccacaccggcaatttgaatagcaacttgtaatataaagtgttcttaactgtaagaggtagttaactattaaagggatcacaaaggggtgacattgtgatataagaaagatgtatttgggctgggctcggtgcagtggctcatgtttgtaatcccagcactttgggaggctgaggcaggcggatcccttgagctcaggagtttgagaccagcctgggcaacatggtgaaacctcatgtctaccaaaaatacaaaaaattatcctggcgtggcggtgtgtgcctgcggttccagctacttgggaggttgaggtgagaggatagtttgagcccgggaaggcagacgttgtggtgagccgagattgcactactgcactccagcctggatgacagagggagactctgtctcaaaaatcaatgtatctgtctgtctgtctgtctatctatctatctatctatctatctatctatctatctagtctctgtcccccaactttgtttggcatgtagctcctaaaactcttgaaatctccaaagtgatgggtgtctttttgtttgctaaggaggcgactggtggctggaggctcctggacagcctggggataagggctggttgccaggggacccagccttgtgattagaaggctagaacttgcagcctttcccatccacctcctgcgaggcaagaggggatgaaggttgagttgatcatcaatggccaaagatttcatgtcatgcttatgtagtgaagcctccctgaaaacccaaaaggatgaggtttgtagagtttcaggttgttgaatacctgcaggtgctgggagggcagtgtaccctcccgtggaagctccatgccgcttccttcatacctttcttatgcatctcttccagttggctgttcatttgtatcctttgaaatatcatttgtaataagtcagcaattttaagtaaactgatttcctgggttctgtgagtcactcaagcaaattattgaacctgagaagggagttgtgaagacctcaaatttgtagccaagtcagacagaagttatgggtaacctggtgtcttaccacttgcgactgatctctgaagttgagggcagtcttgtgagatggaacccttaacctatgggatctgcactaactctggttggtgtcagaattgaactgaattgcaggacacccagttggggactgctgagtattggagaattgcttgggggtcggcgggaggaaaccacacatctggtgtcagagctgaagcactgagtgttgtgaatgagagtggagagatagagtttgttttgccttatgcaagaggactctaaggagtatagaaagagcaaatatgagaagcagctactttagaagaaaacataggaggaaagcttcgtgacattggagttggcaatgctttcttggatgtgacaccgaaaatacaacaaaagaaataaatgataaattggacttcaccaaaacttaaaacttttgtgcatcaaggaatactaccaatggcgtgaaaaggaaatccacagaatggaagaaagtatttgaaaatcgtatatccgataaaggactagtatccagaatatataaagaactcctacaactaagccacaaaacaaaaaaaaacaacccagtgaacagacatttttccacagaagacataccaatggccaagaagcacaggaagagatgcgcagtgtcactaatcatcagggaaatgaaaatcaaagccacaataaaatatgatttcacaccctttaaggtggctgttagccaaaacatggataacagcaagtgttggcaaggatatggagaaattggagccccgtgcactgctggtgggaatgtaaaatggtgcagctgctgtggaaaagatataacaattgctcaaaaaattaaactcagaatgaccataacatccagtgattccacttctagatgtatactccaaagaactgacagcagggacttgaacaggtgtgctacattcttgtttgtagcagcacttttcccataaccaaaagatgcaggcaacccaggtgtccaccagcggatgaatgaacagacaaaatgtggtccatctgtacagtggaatattattctgccttaaaaaggaaggagaggccaggtgtggtggctcacgcctgtaatcccagcgctttggaaggccgaggtgggcagatcacttgaggtcaggagtttgagactagcctggccagcatggcgaaaccctgtctctgctaaaaatacaaaaattagccaggcatgggggcatgtgcctgtaatcccagctactagggaggctgaggcaggagaatcgcttgaactagggaggtggaggttgcagtgagccgagaccatgccactgcactccagcttgggcgacagagcaagactgcctcaaaaaaaaaaaaaaaaaaaaaaaaaaaggagattctgacacatgctatagcatagatgagccttgaagacatgctaagtgacagaagccagacatgaaaagacaaatactgtatgatttcacttttatgaggtccctagagtagtcaaattcagagagacagaaagtgggatggaggttgccagaggctgggggaagggagaatgaatgggaagttggtgtttaatggggatagaattgcagtttgggaagatgagatggatggtggtgatggttacacaacagtgtgaatgtgcttcatgccaccaaactgcacacctgaaaatggttaaaatggtaaattttctgtgatggatactttaaggcatgtatgcaaacacacagaagcagttactaccactggggttgatggaaaagaaaccaagaactcggagcgtcctccacaccttgccacgtcttacgttcaggccttgttggagagtgtgtgactgccacagaaacctgcagcctactggtaacaaaaaggttcttgccagaaggtgtagaaagagtggatctgcaggatcagcttactgggtagccgagaaacctactagagggtatgggtgggcaggagctgggtgtctgagaagtttgctgaggtcccattgggctagagctggggtgctggagaaactcagtacagagcaggccccactgggcacacgccactggcagctgtgccttcagaggaaaaagagaccctggaaccaggaagagaagctgctacctcagcaaggcctggcagctccccacagtgttgtcccctgtggatagagcctgacatgactgtatttggccaaggagaaagactcataaggcctcggtccagtatcacggagcggggcctggcaggatgtatgcagagttaagaggcaatacatgggtaactggcatatttttccagattctttgttttttttgttgttttgttttgttttgttttgttttgttttgttttgagagagcatcctgctctgttgcccaggctggagtgcagtggcatgatctaggctcactgcaacctccacctcccgggttcaagccattctcctgcctcagccttctaagtagctggagatgcccaccatgcccagctaatttttgtatttttagtagagacagggtttcaccatgttggccaggctggtcttgaactcctgatctcaggtgatccacctgccttggcctcccaaagtgctgggattacaggcgtgagctacactgcacctggcccatttttccagattcttaaagcagatccttaggtctttttttttttttttttttttttttttttacttcttttctaatataagcacttacagtttccctctaagcactagcttcagcctacgtattttagtatgctgtgttttcattatcatttcatttgaaatattgtaaaatttttcttgtgatttcctctttgactcatgggttatttagaagtatgttgtttaatttgcaaatagtcaaggctcctctgagtatcttagagctattgatttctaatttaatcttactttggccagacaagcatattttgcatgcttttaaaatttgagacttatggcccagaatgtgtatcttggtgaatgcactgttttcacttgagaaaaaaatatgtatatatattctagacttcctgagtatagagctttataactgctgattaggtcaattgctagttaccagtgttcttcagattatctgatgcttgtttctcagatgttgagagaatggtgtttgctatggcctacctgtttgtgtcccccaaaattcatatgttggagcttaatctctggtgcagtggtgttgggaattggggcatcagggaagtattggctcatgagggcagagtcatcgtgaatgggattagtcccttctgccatgtggggacacagcaggaaaaggacatctctgaagcagggagctagctctcaccagacactgagcaccctgattttggacttcccagcctctagaactgtgagcactacaatctgtttataaattacccagcctaaggcattttgttttaacatcctgaatgaactgaggtggtgttaaaatctccaactatgcatccaggcgcagtggctcacacctgtaatcccagcacttcaggaggccaaggcgggtggatcacctgaggtcaggagtttgagaccagcctggacaacatggtgaaaccttgtctctactaaaaatacaaaaattagctgggcgtggtggcaggctcctgtaatcccagctactcgggaggctgaggcaggagaatcgcttgaacccaggaggtggaggttgcagtgagccgagattgcaccattgtactccagcctgggcaacaagagtgaaactccgtctcaaaaaaaaaaaaaaagagtctccacctatgattgtggaattgcccatttctccctttaattctttcaggttttatatcatgtattttgaagctcctttggttaggtgcatacacatttatgattataatggtgtctcgatgaactgatcatttaaccatgatgaatgtattcctttatctcgtaataattttatcttggactcaactttattgatatttatgtagcctctccagccttcttaaacatgctgtttgggatgcataagaaggctggagaggcttatggagaaacttatgatggtttgacttacagtttttcaactttaccatggtgcgaacgtggtatgtatacagtagaaactgtactttaagtatgtgtgaaaccattgtgtttctcactttcagtacagtattcaataacttacatgagatagtcaacactttattataaaataggctttgtgtttgttgattttgctcaactgtaggctgaagtaagtgttctaatcatgttaaggtaggctaggctaagctagaatgttcggtaagttagatgtattaagtgcatttttgagatgatatttattttccacttatgatgggtttgtcaagacataactccatcatcattcaagcagcatcagtatgtctttttccaaacagaaaatttcaacctgtgtttatactgaaacagcatcttttgtagatagtatatagttgagtcttgctattttattcattctgacagcctccgccttttaattggaatattcaggctatttctgtttaacatagttatagatatgactgggtttagagctactaccttgctctttgatatttatttctttcatcttgctttcttggcttcttttatgttaattaagtattttttagaattctattttaatttatgttttttttttttttttttttttaagacagagtctcactctgttgcccaggctggagtgcaatagcatgatcttggctcactgcaacctctgcctcctgggttcaagtgattctcctgcctcagcttccctagtatactgggattacagacgcctgccaccacggccggctaatttttgtatttttagtaaagacggggtttcaccatgctggccaggctggcctcgaactcctgacctcaggcgatccgcccaccctggcctcccaaagtgctgggattacaagcgtgagccactgagcccggcctgttttgactttttaattgtatctctttgtattgctattttagtagttactttatagattctattgcacattcttagcttttcacagtctacttagaattaacattgtttttcttcatggaaaaaaagtgtaagaactaggcaatcctatgggttcatttaccactttccatcctgtatgtgatggttgttagatatttactacatccatacacattgtaaactagacaatacaataaggaaatttttgctttaaacagccccatgcattttaaagaaattaaaagtaaaacagaatcttttctatttgcccatgtatttgctatatcctgtgctcttcattccttcctgaagagctgagttcccatctggtctcatttcccatgatcttggagaacttgcttcacggtttttgtagtgcaggtttgcagacagctaattccctttcattttcacttatctgcaaatctttattttgctgtcattctttctttttttatttttatttttatttttgagacagagtctcactctgtctccccacaggctacagtgcaatggtgtgatttcaaaactcctgcccaatctcaactcaccaaccttctcctcccgggctcaaacgattctcctgcctcagcctcccaagtagctgggactacaggcatgtgccatcatacccagctaatttttgtatttttagtagagatgggatttcaccatgatggccaggctggtctcgaactcctgacctcaagtgatctgcctgctttggcctcctaaaatgctgggattataggtgtgagccactgtgcccagcctgctgtcattcttgaaccataatttcactggttatagaattctgagttgtcagttttttctttcaggactttaaaatatagggttccagtgtctttggcctccgttgtttctgtcaaggaatcagcattcatctagctattcccctgtagaccacatgttgtttttccctggatgcttttaagactttttatccaagtttgattgctcagtacctacctctgggcaaaaaagcctccagaaaccagaaacttatctagttttattcccctctgtcaggtgtagactctactccagcttctacctacttgagatattctatactgactccaggctgttgttattttgttctttcaaatattttgtccagagctataatgttttctgcagaattgaccagatagcagctactctctgtgaccaggagccttgatcttccagacttgctgatgggctcacaaagctcctgcccgtggccctcagttggcagtggcctctctgccttgaagttgccatgagtgtgtaaaacctacaggctcaaccttcctcattagtacagtccagaaaagtggaattcctggtctgggtggctatggtgccctagaccactggctagaccagggtggtgactgccagctggccgaatgtggggtctccagcctagcacccttggactctaccccaggagttatggctgtttcagggccaggggcctggcctcagcccctgtcccccttctcttctcctcaagttgcccagcatcaggtcccaaccagcatcttttgcagacagggtgggtcggctcctcactagaggggcagggttgggcgggaagcctgttgagccctccttcctgtgcagcccacagccctggggttagctccagaggggtgcagaaaggagcccccaaaggcagaaactcacccttctctctgttcttgtgcttccagggataaaggagaggtggtcctagctggggggctaccagtggcatgcaggaggcccacatgaccactgtttgctggggcctttccttctctgtgagagagacgagagagaggagagagagtgtgagtcagggtagtgtcttcttccagtaacgcagacttctgcacgtgttctctaggagaaatcccgtcactcgctagagctctagatctggaagaagctctgcctctcttctctcctccagtgcagtgtgtgtgtgtgtgtgtgtgtgtgtgtccccacatgcattacacccttctacagaggaaataattcccgtccaagtgcaaaggttgggattggagcaggcagcatgtgggctaaaggagcagagaggaggaaacgggggcgggggtgagggtgggaacaggaggtgggtagatgccacgaggcatgccttccacaactagaagggctggtggagatgaccagaatgctccagacagaccttttatcaaacttccaaaattcaatcttgtttcatgaagcctgaggaccctgcagagtgaaagacaaggaagggctttcctgcaggggggtgtgtgtgcctgtgtgtgcctgtgtgctgtgtgcccccatgtgtgtgcacgtgtggacctgtgtggtgtgtgcctgcacatgtgtgcacgtgtggacctgtgtggtgtgtgctgagtgtgtatatgtgtgtgcctgtgtgctgtgtatgcacttgcacatgtgtacacagatctcattttccttttttctggcttactaagtgccagaaagaatttccgtgagcctctccacccttcccaaggctgcacatggagggacttgcgcaggcacatgtgcgcgtgcacacaacacacacacacacacacacacacacacacacacacacacacgagtcaggggcgagcactcctgtggattgtacctaggcctggcaggaaaccgggttctgggaaactgtaggccccacctttggcagaaaaccatgtttttgttgctgctcgttgaagggaacattaagtggggctggggacagtttatgttgagaagagcaaattttgcctatggcactggggacattgagtggctcctgtcccgggctctggagggcttgggagacacgtctgcagctctgggcatctctcaaggtcacgggcggccacactcaaggttaggccctcctctgtgtgagctgcggtcagcaggaaggctgacctcagaggcggccccagggcccttggaggccctgcccctgagacatgggccaaggtcagagagccgagaaggctgctgctgaggactctggttggcgcccagcccagcggcccttcaggcgggccctgtgcaggggctgatgaagtcagctgggaaatctgtgaaataaagcacaggtcccccaggcttgcccagagccccggcatcagatgaggtgcagagaagggaactgagctgccaagtgtgaacaggagagaggagccccaggaccacacaggggccccgacatggcaggtgcttggtcagcagcggtgctgcccttactgctggacgtgggaaaatgcactgacacttgctgaccagagccggggtgagcatctgggtgaccctgcagatgagacaaaataagggctgccgtgggggaggggcccttgccgggccaccctgctgaggccctgtgttactgtcctgcggctgtcataacaaaggaccacaaatgaggtgactcaaaacatccgaaatcggccacgtgcggtggctcatgcctgtaatcccagcactttgggaggccgaggcggttggatcacgaggtcaggagatcgagaccatcctggctaacatggtgaaaccccgtctctactaaaaatacaaaaaaaaaaaaaaaattagccgggcgtggtggtgggtgcctgtagtcccagctgctcaggaggctgaggcaggagaatggcatgaaccttggaggtggaggttgcagtgagccgagatcgcgccattgcactccagcctgggtgacagagcaagactccgtctcaaaaacaaaaacaaaaacaaaaacaaaaacatccgaaatgtcttccctaaagtttctggagccagaaatcccagaccgaggtgtctgaaggttcattcctcctgggggttccgagggagactgtcccatgcctttctccgagctctgcggcggccagcaacccctggtattcctcggcttgcagctcggcctaccccccacctggccttcaccctgtgtctcttcttgtgtctctgtccaaactgccctctctgttgtctttttaatttatttttagggacaggttctcattctgtcctccaggctggagtgcagtggcgtgatcatggctcactgcagcctcagcctcccaggctcaagcaatcctcccacctcagccttccaagtagctgggacacaggcgcacgccaccatgcctggctaattttttaatttttttgtagagacgagggcccaggctggtctcaaactcctgcgctcaggcaatgagactttgcctcccaaaacactgggattagagacatgagctgctgtgcccagcctacctctgtcttataaagacacctgtcattggatttagggcccactctgattcaatatgccctcaaataacccaattacatcttcaaagaccctatgtccatataaagtcacattcataggtactggggggtcaggacttgcatatgtcttttgggggaacacaattcaacccacaatgggtctcacccacagaacgaacggcctctccagggtgtgcgcaggtgggtgaggggcccaggagagggacctgcgtggcaagagggcttgtgttcacgtcagagattccagaaggagactggatggggtggctgcatggagcaaggggctacagccactgtctccaagtagttggtgggttgtctggtagaaagggagcatttattttgagttcccccaagatatgaagctagtaccaggtacctggaaggtgctagcgagtagagcttgactctttacagaaagaggtgtttttctcacaatgttcacttgaggacggtggaacaggctatttcacaaggtagtgagttccccatgcctggaagcattcaagcaggggccatgtgggagttgttcaggagtgcatagaagggacctcagaggtccctgccaataccatctttgcttgtcttattttacgacaacttgaatttcagaatgtaatgttattggggatatgtctactagaggggcctccagcatcaggccccacacactatgcatcatttttagggcagggaatgagagcaggctccattctttttggttgtctgtgaggaccaggaggcttgctgctgaggcagcttcctgtggaaacagtgtctcagccccgcaatccattcatcggagctccaacatcttaatgaaacactgtgtcagatgggttctgggcatgtgtgtgcagattgtcacaagtccatgagaatgcacacacgcacattgcatgtgtgtgcacacatgtatgcacacatgcacaagaacacgaagacccgaggcaggtatagtccgtgagacagatccctctaggctgaaagactccccacaagggtccctagaacaaggctccagcctcggcagtccctcccacttctggtgggaggatctccacagagaagaagggtcaagaagcacagctcttgatgctcacggtgtaccaagctctgctttaagcttgtgtcttattttttacttatttagcaaatctgtcgctcttgttttgtgccagatgctgttctcagcactttacaaatattgatgcatgtttgtttcatgacaaccctgtgaagtaggtagtgttaccccgttttatagatgaggaaacaggcgtagagggataaagggacttgcccaaggtctgtctctaccttacacgcacatgaacgctcactcatgcggcaggcgctagtttccctctgatgtgagtcaggccttgagctggttggggtctgggtcccactttggttgtgttttgctgtgggcaccaaggaagcttctagcagcctcatctccctggtatgacctagctccagggactggatttccccaaatgctcctgcccagcctggagcctcctttccagctgggggagggctgaacgacccctcactcttggaggctgccggagcccctcctgcctgcatgcggccgctgccgggtggacaggcctgcttgtgggttgaggctcccagcagctggggtggatcatttctcctcccaagaagctttgggagaagcagctgagggggccagcgtcctcctgaggccaattccctgcctcccccagcgcaggcgcgaagccatctttgcttgtgtgtttgccacagacagtggagggcggtgcaatcgtgacgcctgcttgttgcactttgcgtccttgaggacgttgacccctggccggtgctgggcgcttgctcttcagtcatcttgccctgacctggcgtggcaggcccgagcactgctcttttacaaggaaacaggctcagaggccttgagtcacttgcccgggctcccccagccaataattggctgagccaggatttccatccagctctgtgactccagaagtccaagttcttcccatcacgtcagggccaggaaaggattagaatgcttttctacgtgccgattatttggatgatctgtgcagcttagctcgttgtagttgctcaataaaaatgtggaatgaatgggcctatatgtcccattgtgtgactcagagccaatgactctggctgatcctcctgttttcattccgtggcccagcatctccctttggggtgtgtgaccttggaagcagtgactctctccatcccaccttgaatggtgtctgcgccgcagcaggggagcagctggggattgccagcgcctgttgctggtgggctgtgcgccagatcccgtcttggatgtgtgggtgattgtcagccacatgtgtgtgaagggctgtgcgtgtaggatttgtgcaaatgtgcccctccctgctgccagcccatgggaggctgtcaagattctgcccctgcacattagcccacactctctttgtggcccactgctgtggctgttcccttgtgtcacgtggctgcaggcacagcccccaagtggatggggatcgtgggctgaatgtgcatcagatgctcctgcttcttggtgggtggagaccctcaacccatgcaccgtggctgccgcatctgaaaggccttccatggtgaaggacttggacctgagcaaccctccgcagaggtcttagaagtgctccctggccgggcgcggtggctcacacctgtaatcccagcactttgggaggccgaggtgggcggatcacaaggtcaggagatcgagaccatcctggctaacacggtgaaaccccgtctctactaaaaatacaaaaaattagccgggcgtggtggcgggtgcctgtagtcccagctactcgggaggctgaggcaggagaatggcgtgaacccaggaggcggagcttgcagtgagccgagatcgcgtcactgcactccagcctgggcgacagagcgagactccgtctcaaaaaaaaaaaaaaaatgaagtgctcccagctcttcctcctgtggtgaggttctgagtttccatcctcagaagaaaacctggctggggagggcatctctagacccggacataaacgccaggagaccagggctgccctctcaggtgaccaatcacagagactcagggaaagtcacgtttggaagaggcgacactgtgtctcagcctcattcatttctccatcctacagacactgcctggtgcccagcccgcaccgcgaggcttcctaagcagctctgggcaccgtgcacctggcatggcctccagccccatctccctgccttgggagacccggtggggactccgggctgagctcctgtggctgtggaaccttggtggtttattgtggtggctgagaacagggacgtggggttggacgggttgagtgtaactcccagtggctccgtgaactgcctgggagccttgggcagctctttctcactctgtgcctccgcttcctgatggaaaaatgggggccaggggggagcgaccttgaaggtattcgtgggaaccaagcgaggtgataaatgtagtgtccttggtagagaactggacacagagtccacccccatgaagggggctgctcctcctccttctatgtttcctcttgttcttatttctcctcttgtatcttctcttcctgctttccctccccctcccctccccccccacatgcaggcacactccatttggtgccccaactgcctttctccattgtccttctgtaagtggttctctaagtgggaactcaggcctggaaagggtgggcaccctgtctggtgggctctggcaggccaggcgctgagcagcctcaggagacacaaccctaggaaaaggctcatgcaggctggctgtcatgacggactgttggtgggagaggggaaggcgccgtggtaggggaagctttggaaacatccactagtggccttatttatgactcaggacacctgccaggtcactagaacacagctgaggaagctgtcggccagacgtccagaagcatcaacctggtggctgggctgtggggggacctctctggacaggcagacaaggtgtcggaggaaggggctgacactcactcagtgtctgtcatgcactgagggcacaaagggcaggatggagagctggcccacgccacctgtggaatcttccaggtgtgggggcagatggggaagcaagggggcttgaagacacatgcgctcattaaatgtccttaaatcccaagaagaagaacaaggacacatccacaggggcagggctgaaagtctgatgcatggtgttttggggtctgctcctgctgcaacagctacagtggctccctcttacctttctcttccctccattctgttgtgaaaatgttcaaaacacatggtcaagttgaaagcattttacagggaacacattcagccatcacctagattctaccactaacaccaagctacacctgctttatcacctcaccgtccatctatccctccttcgcctggccatgaatccattttatttttattttttggtgcatttcaaagtaatttcaggtcatcctgattatctctggaatcactgtcagaaattccctcccttcccctcccctctcctttcctttccttttctgagatgggatcttgctaggtcacctaggctgaagtgcggtggtgcagtcatagcacactgcagcctccaactcccgagctcaagcaatcctcctgcctcagcctcctgagtagctgggaccgcaggcatccaccaccacacccagcttcattttcaaaatttctcaccaactcctcactccttgtattcacccaggaccacttctcacaaagccagggtgctgcaggaggggtcagaaccccaagccctaatcctggctctgtcattaacactgtgcgaccctcagcaaatcattttgcctgtctaggtcctgttttcattcctatgaaacgagggcgttaaactgtatgttataaataatgagggctaccagttaccaagctcctattttaggccaggcacttttcacatgttattatgagtcctttcaatctaggtattgttctcaatggacagcttagtcaacggaagctcagagaggtggtgtaacttgccaaaagtcccactacccagtgaatgtccccacggggtctgcacccaggagtctgacacagagcccaggcctcagcacctggcgatgttttgggggtgtgagcagcccagcctactctgggcacgtgtttacttgctgttccttctgcctcatgtttgtgtttgtcccctctgaagctcagactgttattttccagttccaaataccaaaactggctaggcacggtggctcatgcctgtaatcccagcactttgggagaccaaggcgggtggatcacttgaagtcaggagttcaagaccagcctggccaacatggtaaaaccccatctctacaaaaaatacaaaaattagccagacatggtggcgtgcacctgtagtcccagctactcaaggagaacccagctacccagctactgaggcacgagaatcacttaaacctgggaggtggaggttgcagtgagccgagatcgcaccactcctctctaggctaggcaacaagtgtgagactctgtctcaaaaataataaataaataaaataaaataaaaattaaaaccaaatgccaaaaccaacccacaaaataaaccttggttaaagtagcctgttcattttgctttaactatgtatattgcaccagattctgccaggggctcagcgtataaagatgagacccctgccctgccagacaggtgggatgatggccataccttgagttagtcaaggcaccatctggctgtgtaacaaaagctaaaacatcagaggctgagcagcactcggacccacgtcccagtccaagtgtcagtcgttatgggggcccaggacagcccggacctagttcattcctttggtgcatcctcgacacacagcttccatctcttgagctgagatggttccagctcctgccgtcatgtctgcactccagccagagggaagggaagaagggagaggggaaagggcaagtgtccctctttatttttaagggcatgacctgaaagttaaacacttcagctccttcccactggccagaacccagttgtatggccgctcctgtcatcagggaggctgagcaatgtattcttcagctgggcttccctgtgcacaaccaaaacttcagttactatagaaaaaagggagctcagatattggggaaacaactagcatctgtaccacatgcactgatagctctctttgtatgaacagagctgtggcaggccctatgccagggagaaagtaagattggaaaagagcttaccaaggaggtggcatttgcactgtgcttaaggggcaagaaaaacgtcttccaatcaggagccacaaatgcttggctgaagtgctactgctctttcatcctggagctggaacagacgtcaccagtcaatcatgatggctgctgggtgcactggctaacatctataatcccagcactttgtgaggctgagggtgggaagattgcttggggccaggagtttgagaccagtttgggcaaattgcaagaccctgtctctgcaaaaaaatataaaatgtagctgagtgtggtggcacctgtagacccagccccagctactcgagaggctgagatgggaggatcgcttgggcctaggagttcgaggctgcagtgagctatgattgcaccactgcactccagcctgggtgacagagcaggacctgtctctaaaaacaataaaataaaatcaaagttttaaaatggaaaaaaaatcatgagcacataactccagatgtatcctcaagatagcaaacccgggtgggcgcagtggctcatgcctgtaatcctggcactttgggaggccaaggtgggtggatcacctgaggtcaggagtttgagactagcctggccaacagccccatctgtactacaaatacaaaattagctgggcatggtggtgggcacctgtgatcccagctacttggaaggctgaggcaggagaattgcttgaacccaggaggcggaggttgcagtgagccaagatcacaccattgcactccagcctggagaaaaaaagcaaaactctgtctcaaaaaaaaaaaaaaaaagcaaacccagggccaggtctgtagccacatggccaccttcttccctgagcatggaggcagcctcagaaacctgccccacatcacatcagtgggcagttgattgggtcagcctgccagttgaaccctatttgccacagtcattctccatagtaaggggcattctagacataccccccttcccagggaagaataagccgtagctgcctgagcgttttatccagtggtgtgcatgtcttttcccaactctgtgtttagtgatgtcctgtttgtagcttgaaatttgccacagtgggtgtgtttacaccacaggaattggcaaacactacatatcaggccttacctcctgctccctactagggtaggttgttttttttttgttgtttttgttttttgtttctttttttttttgagacggagtctcgctctgtcgcccaggctggcgtggagtgatgcgatctccgctcactgcaagctccgcctccctggttcacaccattctcctgcctgagcttccagaatagctgggactacaggcgcccgccaccacacccggctaattttttgtatttttagtagagacggggtttcaccgtgttagccaggatggtctcgatctcctgacctcgcaatctgccctcctcggcctcccaaaatgctggcattatgccactgcgcccggcctagggtaggttgttagaaatgtaccagcctgccagtttcagccttgtttgtctttcatcctttttttttttttttttttttttgagacggggtctctctctgttgccccccaggctggagtgcagtggtgtgatcctggctcactgcaacctctgcctcctgggatcaagtgattctcctgcctcagcctcccaagtagctgggattacaggtgcccaccaccacgtccagctaaattttgtatttttagtagagatggggtttcaccacattggccaggctggtatcgaactccttacctaaggtgatccacccgccttggcctcccaaagtgctgggattacaggcgtgagccaccgcactgggcctctttcgttctttcttaatgaaaatcttcctgaaagatttgcctactgatgtctgtgtcaataggtactgcctgcgggacagagcctgccctccttttgaaggtctttctctgtctgggtgaccatctgcatgtcactccctgctgctcagaactaaagatgtagctatgcctggggtaggttgggaaaacctgtgggaatcacagagcttgctgtcatgctgtgttctggatacctgaagcttggcaggcaggtgggatcgagggtgggcattaggaaagtgatgtggctctataggaaggggacataggtcctgagattttaggtccccaattggacaaagctgttttttttttctggataaatgttctagcttattcataatcgagtggtcagttttcttttcttttcttttctttttttttttgagatggagtctcgctctttcgcccaggctggagtgcagtggcgctatctcggctcactgcaagctccgcctcccaggttcacgccattctcccgcctcagcctccggagtagctgggactacaggcgcctgccaccgcgtccggctaattttttgtatttttagtagagacagggtttcaccgtgttagccaggatggtctcgatctcttgacctcgtgatccgcccgcctcggcctcccaaagtgctgggattacaggcgtgagccaccgcgcccggccaagtggtcagttttctcagctgccgggtcttgcacaccttgctggctctggagaccatatgcaccatgtagaccccatttgtttcctaccctcagtgttgggggaggggccaagggcctgtcgatgtgttgacacctggccattcactggccttgaatgtccacattcacctccttgaaatcgatgccccgtatcggaggctccatgtggatttgggggcagaggcctgtactccagatggtggggtggccttcaccaatcaggcagattccctgccctgccctgccctttgggctctgtagctccagatgtgtgctcaagatctgtggccacatggatgggacaagccacagagactcagactccgtggtccctgtgaccagagtagccgtggccctgtctgggaatgttcccaccctgttgctgaaggtgagaaatttctctgtgctggagaacagctgtgctgagaagttggcccatctggcttgcaggactgctggggcaagggaggtctgctgccggtctcttccttcctcctctgactgggtgctccttgtctaggttccttgcagcaaaagaattctctaatttattttgttcccttattgagtctctactccatgaagcccacctcctaatcccagctgactggctcccacctcctcaagaggaaggccaggggcagacgaggctgaaggaggctgactcccctgtgccttcgcagtctgagctgatgctgctgtatgttcacagggctccttcagcttttaaaaaggcttcaacacgttcgtcacacgcttgtggctctcctggatgccacactaactcagtaaggcctgagttagaggctgttcctgaggctgtgaaaatagaagaagggtccagaggagaatcccttcatctgacgatcccaggaaggcttcctagaagaagcagcctctgagctgagacctgaagacagatcaggcctgagtcaggccagggagggtgtgaggggcccaccaggcagagggaacaggatagggcaggcacagaggtctggcacctggcttgtggggaagtgtgagcccctgggcatgaccaaggcggggagaagtggcgtgagaggaggcagatgtggctggcaggagatcggcggccccggccttgctgagctccactctgtatgcaccaggtgacagaggctgcccaggacggtgggcagggaagtgacaggtcacatggtcatcccaccaacagccgggagtccagcttggggggacccaagaccctggggaaggcacgagtcaggggcctgctagagccaggagctagtgggagaaggaaacagtgttgcttatgaattataaacagacactcccgcaactttctctgacgtgatacaatctcaaagtgggccacccagaggtgggaaggtgacttctggctctccaggccttgggcctgtcttttttttttttttttttttttttttgagatggagtctcactctgttgcccaggctggagtgcagtggtgtaatcttggctcactaccacctctgcctcctgcgttcaagcaatcctcctgcctcagcctcctgagtagctgggattacaggcacctgccaccacacccggctaatttttgtatttttagtagagatggtgtttcaccatgttggccaggctggtctcgaattcctgacctcaggtgatccgcccaccttggcctcccaaagtgctgggattacaggcatgagccactgtgcccagccgagcccatcttcaagttctccctggccctcagtgtttctgtattagttcacccttttggctccctgcttttaagagtctcccttaagactgtccccaagtggacaggtccccagaaccaaggagcagccttaggagtccccagttacagacactccagggggtccgtgtggccctcagcctctggcctggttccggcagccttggtcctttgtgctgtctctcacatagcctggccagagctggccaggtcccttggctgggccgagtcatcgtggccagtgactcatgcagggggagaaaagtgaggagggggaacagagtgcgagggggactgtgttaataacaaacccattaggtccctgaggtcacttcacaggagggacaaatggttcatttaggttgatctggctgccggctggcttccagagacactcagggtggggaagatttcattatctggggaaagcaataccagattgtctggaggggcccagccagcgcaccccgcgcttcctgtctgcctcccacgcagagcgttctgttcccaaggcggcaggccaagagcgcgagccgaggctcaggtgcaaagaggggtgcggcatgggggcactgcagggcacggggtgcatgcatttttatttatttttttactgagtgttagggtaatttgttaatggggtatatttggtgacataaaaccttctgtcgattcatggcagtctggaacggagtggaagcgtcccactcctggggaacccccacacacatttggctgtgaacgtcggtgcctttgcactggagcctctttggagtgtgctgggcagagcggagaggttcctcttctctcttctccatcatcctgtggaggtgtcaacatgtagccagagatggtcagtggcagtgaggagaggggggcaggaagagaccagggctgggggcttgccagcccacagttctacccctgaacacccatggcctccctgttcaggtcagcgaggctgggggcagagacgggcaggggtcccccaatgttgggcatctccccgctccctcatactctggatttgccctctggagaaagctctggagcacccagaagtcctggggctgctggctgaggtggggagcagagcccagctgtgcctggaggctccccacttccactcagcttccagggacagtctcagctgtgcaggcccaggccgctgaggctggctccagaaatttcttcacaaccaccactggatggaaaaccagttctctaaagggccccagagccagttttgtttcttcttccacaggttcccatagttagagcatcgggtctttgttagagatgcagaagagacgatgtccccagcccttatgtggttcggtctccactgtggatgttggtgatcttagtctccttctcaaaaccaagagggctgatgccccacattccaggcccccagaaagagccgccacccacccacaccgctacatcttctttccacttttctgttccggaaagagtagagtggatatgcgctcctgtagaaatccatctacagcctgactgcagatgtattttgctcccttattgagtctctgctccatgaagcctgccttgtttgtacctctttctctctctttctctctttcttccctctcttccttcccttccgttcccttcctttttctttccttcctgtcttattctttcctctttctttctttcctctctctctctttccccctttctctgtctttcctatcttttctttctctctctttcctcttttttgaacagccaaagatagaatgaatggcataggtaggtactgagctccctgtaactggaggtgttcaagtgtagggtggatgggcatttatagggcaggcattgaggaaggatctccctgggattgtggatggcaggacaggccctgtggagccttctgagcgggtgcagaagagggagggcatgttcctgctccctgcccttcccgggttgccaggccgccactcccaacctccaccctctttccttccacctgctgggccttacgggatgggcagaggcattgttagaacatggagccgcggtccacagagggccagcagggaggagagctccctggggaccacgtcgcctcagtcactgtggtgactttgaaaataaatgctttcttctctgcttgagtccctgttgttcctgctgacgtggaactagggcaggctggtgactcagccctcatccctgcactgcatcggtggcaagttgcctccagcctcagaccccacagagcagggtgccttcttcagaaaaacagtagggaggccaggacaccaagggccccagggacagcctgtttctcctggctggcatgagttctagccaagcctcctggtaccctgggggtgaggaggtaccagctgtgtgctttagtcactggctgctttgaggctgggtcggtgccaggctggccactccttcttgtcccctagtgtgactttgcagagctcccggaagggtcagagggtttttttccatcactggtgtccatgggatactgtgtccccatctcatttttgtactccagtctcagacgggtgctaggaagttggagactttagccatttcacgactgtgtcttgcggggctggagtaggaacaggagtaggaggaacgctctggtcatgggactgtgtgaagagagaaggatcaggaagaaaacatgagctatcatgtctgggttatacctcagcagagccgctggtggcctcccaggcatctgaatttactaatcacaaagctcaccaggtgtgcaaataaacaaatgctgttcaggaggcacagccagggttctgctggagagggatcatcttggaggggtcatactttccacccagtccttcagtccttctgtcctgtgtgtgtgcagcccctgaccaccaccatccctgcccctgccacttgctcccagggttccatcaggttggatgttattgcaataaaatgtagcaacagaaggtccaggcagtgctgcagtccctggtggtatcatcagagccagcaggcagcagggctggggaactccaagctgattcagtcccaagtgccggagcggggagctcggatgaggtgggggtggggaaccggggagccatggagcagagcatttgctgtgctgaaggccaggagcctccttgggagatcatgaatttagaacactaatactttgtttaaaaagtcccctgccttggagataagagctcaggccgctgtggtcaggttttgctgtaaatgttctgcacaaagcaggctggggggatcactgggaagtctggggaacagattggtcatgtgcttctttgagtgaaaccttatggttgcattgaagcggccaggcagagggtgtgatggggtgtggtagctgcacaccggctcagtcaggctgaatggggaaatgcaaactcaggtggcctgaaagagacttagtggtccacagcctggtggctgctcccagtacaggtgatgtaaagagagaaggggttccgggggcttggcccaggtggaaaccatgcactgtctgtgatcctgggcatgtcgaggctggagcaggtctgcttggtggctggcagaacgcacatgaagaatccatgtgtgttctgaacgtcccctctgcccctttgggctcatgccccatcaggagtctcccgactctgccattctgcaaaggaaactgcgctttgtcattgcacaggatcgaacaggtgtgtgtggagtccctaaagccactgtctcaaggggtctcatgggacaatgggagagttgctgtgatgtttaagactaaagtgatggctgggcgcagtggctcacgtctgtaatcccagcactttgggaggctgaggaggatggatcacttgaggccaggagttcgagactaccctggccaacacggtgaaaccccatctctactaaaaaaacaaaaattagccgggcatggtagcgggtgcctgtaatcccagctactcgggaggctgaggcaggagaattgctccgatctgggaggcggaggttgcagtgagccgagatcacgccactacactacagcccgggcgacagagtgagactgtctaaaataataataatgctaataataaataaaataataataataaaataataaaagcaaggacttgaacaaatatttgcacacccatgtttgtagcagctttactctcaattgctcaaatgtggaaggaatggatatacaaagtgtgtgtacacacagtggaatatcattcagccttcaaaaggaacggaattctgtcactacatgtgaaccttgaataatgaaccttgaagacctcatgctacgtaagcctgtctcacaaggacaaatattgtatgatttcacttatgtgaagtcaaattcatagagaaattggaatgacggttgccagcagctaggggaaggaaggatggggagttattgtttaatgaggacagagtttcagtttgggaagttggaagaagtttcggaggtggatggtgttgatgggtgtacaatgtgaatgtacttaatgtcactaacatggaaacttggttaaaatggtaaatttgtcttttttgtttttgttttttttttttttgagacggagtctcgctctgtcgcccaggctggagtgcactggcgtgatcttggctcactgtaacctccgcctcccaggttcaggcgattctcgtgcctcagcctcccagagagctgggattataggcgtttgccaccacgcccggctgatttttgtatttttagtagagacagggtttcaccatgttggccaggctggtcttgaactcctgacctcaggtgatccacccaccttggccttccaaagtgctgggattacaggcgtgagccatggtggctggccaaaaatggtaaattttatattacatatattttatcacagtaaaaatgcattgctctattagaaaaatgatagatttttacaatatgaattaaattacaagttatgaaggaaaaattaagcaaaacattaaaaaattacttataagtaattatatttaaaacaaaagataataaatacacaactttcatcacctcttaggttttttgcaacatttaactattgtctgtcctgttgcggttatgttcttgaggttgtatttgtatgatagaaacactatattcgtggtgactaaacatctcttctcagtctcacctccaatgatgtcatacagataacttgaaattggccggctgggcacgatggctcatgcctgtaatcccagcactttgggaggccaaggcaggcagatcatctgagttcaaaaccagcctggccagcagggtgaatcctcatctctagtaaaaatacaaaaattagccaggagtggtggcgggtgcctgtaatccgagctacttgggaggctgaggcaggagaatcacttgaacctgggaggtggagtttgcagtgagccaggattgccccactgcactccagaccgggtgacagagtgagaccctgtcaaaaaagaaaagaaaagaaagaaattggccaaggcaggaatattgacaccacaggaataggcaagcgctacaaatcgggaaactgagtgttgttgcttttgctggccccaggtggccggttgttgaccgttaactggcacactactggaggagggaggttcagactgattcgcagagagactagaggtagaaacgcaccatggtttggatgctgagggtgagggaaagagaggagtcaacagtggtgcccggagacttggcttgagcaactaggtggatggtagcaccgtttcctaagatgaggggctgtgggaacttgaggggctgtggaaggctctgccactgacggacccagggctcggcagctctgggaggcctactttgtgtcaggccacgcagagataagaccatctgggccctgcccttgggaagtctctgtctatgaggacacagcctgccacctaatggggtgtcccgtctggagcctcagtgttgctgggagaaagcccctcaccttccttcgctctccgagcctcttttgcttccctgccagctgagcctctccatggaggctgtgcctggaggggggtcatggatatggatgtgtgcgccaaacgctgcttcctcgtggatttcctccccactccgttcccacgctttgtaagcttcatttccccggggcctgacctgtggggtttctctccagacctgctccttcccatttccagaaaggcgtgcaggggtttcctatggctctcttccctgtccccatcccccttcccttgggacagtgatctgctggacgggtgggctacccacagggtttgtgattgcttagacatctttgctgtatgaagctttgacctcaaggcatgatgcagatgggaataaggcacgagtttctcctggctgctgtaacaactgtcgaaactgggtggcttatagcaaggggaatgtgtcctctcacagttctggaggccagaagtctgaaatcaaggtgccagcagggccagcttcctctgaagactccaggggaaaacctttctttgcctcttccagcttctggtggccccaggtgttccttggcctgtggctgcatcactccggtctctgcctctgtcttcacaaggcctttttctgtgtctctgtactttcttttctgtctcttagaaggacacagcattgaatttagggcccaccttatcttgagatccttgcctaaattctttctgcagagacccttaaacagaatcaggtcacatttgaggttccaagtgggcatatctttgttttgggggggatcaccggcccactgtaggtctcgttgtgcactgaagacgcaggcggtccctttggccaggcctgcagtcggtcttgccttcttttgtgaccgtggaagaatgcaccttgctggatgcacaggcctttatagttcttttgttcttgccaaatttcagctcagtttcctctctgctgccggcgtgcatcttctctgcccagtgccccttctgggactgtgtgtccaggccctgaggccctagaaaaggggggtggagggcctcctcactatcctgtagcaatgaggcctcattaaaatcctggagccccagactggacccagcccttagctatgatcaaaggacagctcgggatatgattaaagggctagagaaagatgatttaggctgagaaagaggaggccaaggagcaactggattgtccttgaatgtggaaaaggtaattatgacttgaagggtggtgcccagctgtttcccatctcctctgaggacaggaaaaaaaaggaaataaatgatgtacaattagagcagttggttagatacgagggtgaacttcctggctgggagtatggccaagccctgatttgggtttcctgaaagagctcggggaacctccttacctggaggtttctaggcctggtcatgtggctctgagtgattacattgaaggggcagtggctggggctggagccggtgggctctgagcacagtcacgaaggcatgcgcactttctggctgctctcctgccattgtcccttgggttcccattttggtgaggcgtgcaccctggcggcgctccccagggaactaaatatgtttgctgcactgtgcgtggagatggagaatgtacaattggctgaccctgtgctaatctggtggaactccatgccagccctgggaaagaacaattgcatgggtgtgtccacactcaccaggtgctttttagaaaaacactcgagaataatgctgtggcttaggatggctgttgtgccggacccggcatcttcccaggggggctgtgttgttgggctgagtttcttaggtactggacccccaaatccccaaatacggcgtggacaggtggcccagtaggggctggactatccgataggcccaggtgctggagttcagacaagacataccctggcctggcgtggaagatacggggtgctattaatggcagcaatggctgcatttctgaaacccgggctcccaggccgacgagggtgtgcacgcatctgaaatgtctgtggttttgcagttcccatgtccacaaactcacttggttgaaaatagttcaaaatatccaaagcatgagggagggagtgcctgcttttcttaaaaaggaaggacttgatttcatctacttaaaaagccacccaaacctagaacattttccgcaagagaccccctgccccccgcctctccagaatggctggagagtctcagcactcctgcacatttgggatatttcagagggggtggggaggggcaagtgggcagcgagcgacctcagacccaggatgagctgtcaggcgctccccggccacacattcaagggaccggagtgcagttgtagcgttgcggcctgctgcttcgggggtgggggtgttgttccatgctgtgaattctcacatggcccctgactctgggcagaggccgagggtctaagggacggggtgacagggagagcatgcaggagtgggtttctggctttccagggcgagtggaagaagcgcctctctctcttgtaggtgacagacctggggggcccttcttgaggatgagagcctgttgcttctcaagttctgtgtctaacccaggtccccaggtctaccccagcccctcggccctgcctgccttgtggatgatatagtttaagggtagagaccgctggcctggagggaaggctaggcctcaggttagggcccagaagggagggagaagcccttggggcagctccctttctgctcactcactgcctagctccttccttcacaccttccttcggaaacgtctgctcctgacaaggtctacttcctgctctcaggaggcccttattgtggaggaagggaggcgtcgcccgtccctggcttctctgacagccgtgttccatccccgccctgtgccccttctcccggacagtgccttctccagggctcacccaggagggtgcagcggtggcccccggggcggtggtcgtggtgggggtgttagctgcaggggtgccctcggtgggtgggagttggtggcctctcgctggtgccatgggactcgcatgttcgccctgcgcccctcggctcttgagcccacaggccgggatcctgcctgccagccgcgtgcgctgccgtttaacccttgcaggcgcagagcgcgcggcggcggtgacagagaactttgtttggctgcccaaatacagcctcctgcagaaggaccctgcgcccggggaaggggaggaatctcttcccctctgggcgcccgccctcctcgccatggcccggcctccacatccgcccacatctggccgcagcggggcgcccggggggaggggctgaggccgcgtctctcgccgtcccctgggcgcgggccaggcggggaggaggggggcgctccggtcgtgtgcccaggactgtcccccagcggccactcgggccccagccccccaggcctggccttgacaggcgggcggagcagccagtgcgagacagggaggccggtgcgggtgcgggaacctgatccgcccgggaggcgggggcggggcgggggcgcagcgcgcggggaggggccggcgcccgccttcctcccccattcattcagctgagccagggggcctaggggctcctccggcggctagctctgcactgcaggagcgcgggcgcggcgccccagccagcgcgcagggcccgggccccgccgggggcgcttcctcgccgctgccctccgcgcgacccgctgcccaccagccatcatgtcggaccccgcggtcaacgcgcagctggatgggatcatttcggacttcgaaggtgggtgctgggctggctgctgcggccgcggacgtgctggagaggaccctgcgggtgggcctggcgcgggacgggggtgcgctgaggggagacgggagtgcgctgaggggagacgggacccctaatccaggcgccctcccgctgagagcgccgcgcgcccccggccccgtgcccgcgccgcctacgtgggggaccctgttaggggcacccgcgtagaccctgcgcgccctcacaggaccctgtgctcgttctgcgcactgccgcctgggtttccttccttttattgttgtttgtgtttgccaagcgacagcgacctcctcgagggctcgcgaggctgcctcggaactctccaggacgcacagtttcactctgggaaatccatcggtcccctccctttggctctccccggcggctctcgggccccgcttggacccggcaacgggatagggaggtcgttcctcacctccgactgagtggacagccgcgtcctgctcgggtggacagccctcccctcccccacgccagtttcggggccgccaagttgtgcagcccgtgggccgggagcaccgaacggacacagcccaggtcgtggcagggtctagagtgggatgtcccatggcccccatccaggcctggggatatcctcatccgcctcccagaatcgggccgtgggggacagaaggggcctgcgtgcgggcagggagagtattttggctctctcctgtcttcggggtttacaaagtgtgttgggacttgcggggctgctctgtccaagcctgggtctggcgtccgcgtctctgagcctgtgagtgcgtgcgctttcctgcgtcctcttgactgccggtgctggggctctgcgtcctgcgtccgcgggagtaaatacagcaggcgaaggggaagctcacacaatggtctccagcgctctggggcagggcttctgaggggcgggcctgcctctgccgggacctggagcccccgcccctcggagaggctcctaggctgacttgggcagagccctctggtgggccgggagggggaaaggctgtgttgaaatgagcaaactgtccaggtgtcaggccaagctgggaggtgaccagcctgaggtcctccccgctccatggccagaaccagggctgacatctgggtgtcctgagcccagctgcccacacggcccacctggggtcagccctatctgagtgggggaggcggggcctcctgggggaccagaactttggctggacgccaagcagagtgccagtggctgttcttcagggctgggcctgaggagggtgtggggcggcgaagggacgggagggggttgtgatccagtggccactggcgctgtgcagagtgtgagctggaaacatcgtagttactttgtcagcttagtggtgaaagccctttttcaggctctatccctttgcatccctgcttcccagagggaggggaggtctgggtctgcagagctgggagggcttgctgttcccgcccccctcccccacaacacctcctcatctggacatctttgggcacatgctcatactggggtctccctaggtccactgtgttccgttgagcctcctgcagtccccgagtgaatgtgacctccctgcccctgcctctttgcaactcctccctgcgaccgctcctccaggggccttccttgtcccaaatgtccaagtggcacgacttagccggtctgaccactttccagtaagcccttatggagagaggccctgtgttgtgcagagctctcctcctgcctgcgggatcgaggtctctgctctcagttcctaacagaaagtgtcgggcccccagtgggatttctggggaagaactctcgtgtctcaacgggagccctgtggcgggaggggaggccagggtttggggttgtgttcgttgtacagctgtcaccatttgcactatgaaagttgttagtgccccttccttgggtctctgggtgtaactccacccttgcccccatgtgcctccatctggagctgcttctgcggctgtctcccaagccagttttgtgaccctgtaatttagtccaagacaatgggctcattgagaccatcctggtgcagcagttggcaatcctttggctctgggggaaggtttctcagtctcggggagtggggcctcaatctgctggttccctgtgtttatcagtctcccccttgtgtgtcctgaatggttttgctgggaattctggtcttagagccatcaggtggcccgagtcgataggcgtgagagagtgtgtgtgtgcatgagtgcgcatgtgcatgggggctgacctggggtatggaaaggtggccctccctggtgcccaaggagcctggagtatagttggagggtgtgggggtgtgtatatgggagttggacaaccttgggtggacagacagacgtggggaagggatgattgaaggaggtggaggagagagtgtgattcagcccagccaggggtgatgtggacaggcagcttccgaatcagggtagagaaaagtcaccactagctagcaggggagaagtcagtatggaggaggcggaccttgagggagagtaggaattggattgcaagaggaaggagagccttctggccagcagcagccagcagcagtgggggaggctggaatgagctggctggagagggggctggggcataaggaggggcctgcctgtgaagatcatatgggccaggctgcggagggccaggcatgcccgccgggagtgcagctggtccacgggaagcatctggagtggctgggaatgggcgcaggagcagcgccgtgggagcacaggtctctttcccggggcggctcacctggtgtcttggttcctgcaaggtaggccgaaagggtggggaggaaactgccagctccttacagcgctgggatggtggccccagggttcctgaggccagcggatgtgggtgcctgtcaccatgtgggttgctgaggggcggagactccaggggccaccccaaagcaggacgagctctgagccacggcatctctgggggcagttttccaatcgagcagacgtctaggcctggaatcctgtaacagaggccacagggccctgatcagggtgttctgggaggcttagaactagtggcagtatacagggtagacggcaagtgacctggcatggggaaagaggcaggtgcccaggccggcacagcacacccgtaaggaacaggtagacgggaagccgtccgtgggcctgtgtgtgtgctcggagttaaaattctgccaatgtcccatgtcctgggcacatctaccccctccctggggagcacctttctcttcaccttttccttccccgcctgtccccttcacccagggccttccccatccctcccgtcttggggaccgagggcaccatggctttatgttccatcaccgatgagttgcacagggattcagtccttccgctgttcaggccgggtccttcaggctcagggttcccaggaatggagagggtatcagtgtcttccatggactcaaacttcccgcatcccgcctttgctcccccttcaagataggtctccgagcttcaaggttttagggctctgtggaggccgccacgtagcagcaaggagaatgttttgtatttggctgatgagatttttagagtctcattttctacttttccactgtacaaacgggcctccaggcgactgcagcacccgccactgcccgtaatagggtgacaagagggatgaccctttcctctttctcccttctggttggtggaggcacggggctggcggacggcatgtgctttcgtgaattcaggccaaatctgttatcgcaaacacgattacaactcgggtctttgtgtaacaaaagcctttccaagtaccagctgttggcctgctttgctcagcggtgtttgctgtaaccagatttgcacaccgagaaagaatccaaaagtccttgatgtttgttgaaacaatctggcccaggacccacgtgctcagatcccagagctgtgtggcatctgagcttctcccgagcccccactgtcgcccgaggaggacccccagatctgtgttctggaggcagagcaggctgtgggacgggcttctgggtgggaaggaccatgtggatatgccttcttgtctgagagtcccaacacctccgggacgtgggagctggcgcgctggcaggattcaggtgcctctttcctctctagagaaaaaggccccgttgcttggtaataggtgcagacctgtccctaattaatgccagtaggcctcttgcgtgatgaaccctgcctttcagccaagactcaaggcatcctgtgaatactgcctctctgcagtttgagcttttgtggtgggaggcaggagccatggggagtgggggcaggcctcttacacgggtcccacagccactggcagcactgacttgatgctctttgagttcagagcccagggccagacagacccactgtcccgactacgagttggttcatttagaggggggcggacacagcacccaggcagcagatgcactgtgatcagccttgcagcggggctgtgggttctctgggctggatgtccgggaagaggcaggtggaggtaaacgccaggacacccctgcagtgactgggtgactgcaggctggaaatgctttctgtgggctgtggctgtccaggaaggttttgaatggggctagtggacagagtttgcatccagaggggcagtgctttggaggagtgaggggtatggcagtgtagggatgcccaggccgccctcactctgccattggaaagctgggcggcttcggtttcttcagtttcttcgcctgtttccctgcctgcaaagtggggttagaaacagctctctttgagggttgctgggggactctgagatgcagcccatggcgctgagcacgggtcctgcctcctacgggtgtggtgggtgtcgcggctggtgtggcatctgggcgggaaaagggggcatttgcaaaggacaggtaggtttggatgcttaaatatgcagatctggggatgggaggtctcaggcaagggcctgtgtgatgccactgtatgaatgaggccggacagcatggtcaccactaattatggaaagcacggcagacactagtgccagtagcgcccgcctgggggtccctctgagcccgacaggtactcaggctcccagtgcagccatgggaccccccttttcctgcctggctgacattctggaggctggcgtcatgttggctgcaggttcctcttactgggaggttgtcctggtcttccctgccaccatctacccccacccccaccctggagtgtcacagatgggtggaccatatgcccatctgcagggccaagcgctgacaatgaggtgagcacttgctggatgaccggaccatgaggacagcgggggcgctggcagcctgcgttcggctctgcaggctggcctttccctgaaaagcggttgtggcagagtgtgcatcccagggagtggtgcctgctgccctgaacattctcatccagcaggcctctgcaagggcccagtcaagtgtggtgcagagctgggctggcagctggaacagtctcatcttgtctagtggtgagaccaagggctgatgggccaaggctgcgtgctgcttgcccagcccgtggacccatccactgagcacccccatacccctacactgggcccggggtgtcaggaggtggaggggggactgggtgcctggaaaaacaagcccaccgagagcctgagcccccaggggtcagtatcaggcagtcaccacggtgcccggtacacagtggccacctggtctcgtcggctgtcttggtggtggagagcgtgcatggtggccgtacgtgatgggcatcacccagggtaatacagatatgcagactgtgcatttgtctgtaggagccagggacttctcagcctggcaacctgtgacctctgcctacccgttgggagagaggtgctgttccctgatagcctggtgccgggagagcagaactagggtctcctcctcctttctccacctcccatttcttacatgcccaggcatcaggggaggtcacactcagggatgagtcttggccactgggttcagggcctcactgttgccatctcttccctttgccagccagccaaatgcccgtccatcatcgtgccggggatggggctggcctgctcctctgaagtctccttggtgtatagcctaggctggagccccggacgattccgccaccccctcccccgactttttctttttattttgattcatcccagaaacccagccaaaaaccaagttcctgtgctctcccttgacaaagccactgaggaaaaatggtcaaacactgcctttctttccaaagccctcttggtttttcccaaatttggaggctctgagttgcttatgagaccaaagggtccggaactctctggaacacagtcccagaagtgggaggatttgtcatctctccagccaaacagacccaccagttggcccctagacacccccaggcgcctggggcatttctgggctcaggctgtttaatttggtctgcagagccccgaggctccgtttagactgggccagcagacagttctagagacttcaagtttgttgtcgtttttaaaagtcctgccaatgcccagaaacttagagggacaagaagatgacctcgatgtcagccgggaccataaacagtgaggcccgcccccccccccacccatgcctgcctccactgctcccgtagctgggtctccaggggattgcccgtggccatgggggaggccgggaatgcggggctcagactctactgggcttctcgtatttttttgtttttccttgtccatcttctttctcggaaatttctgaatatccccctacagcctttggcattctgtcactcctggcatctctgggccaactgggaaagccatcatttgtccaatatccagaaaatcaaggggcctggccttaaatacattgcagtgccctcctccccacatggcatcgaatttcctgtgtcctcaaagccaggagcctgtgccttggatgtgggcgatggagccttgcagacacctggagcggctttcctgggagagtctccctcgccttcccatccacccgcttcccctcccctgccccaagctctggtcacagcctcggaggggtcatctgagtgtaggttgcctccaggtgtacagttggaggggggcagttaccccacatccccctgtctgctaggggcacccccagggactcaggtcttgagggacagcggaagggtggggtggggagtaggccgttgtctcgtgccacctgggtgttatgtagactctgaatgggcagttcctgggagctggtttttccttctcaccccttctacagtgctgcccctctgaggggctggagctctctggagccctttgcagcctgtggcaggtctttctgattctgtgcctggtttcgcagcctccaacccatagccagtggcatgaagaacattcctggctgtctctacctgtggcctttgcaggcagcagttccctggggcagggcctgggggtcctggcacctccttgtgggaccccttgggtatgagggagggagccacctgggccacagatagacccccttcctgtatccaggaggttcaggatggacctgtctcatctttctttctggtgggaagagagcattcctggccatggggaatgtggcctggacagagccacctagcctctcccctcccccaggcagggccctgaaagatggagatggctctgctcctgccaggtcaacagccagcagtctggtggatttccatgcagtccaggcaggatctccttctgtccccaccccccaccccatgtgcaggaagctggttccaagcagggacccttggccccgctttccacgtgggtgggcagtttccctgcgaggggcaggccaggcccctgccctatgtcccccagagaccgatgttatctacagtaagagcatacaagtctttttggctccaaaccaggcctggaggggtggtcttctcctctgtcctctgcctcttgccccccattaaaggtcagggaatggagtgctctgtatgtttgctggggttgggttttttcctttggtttaaaatgaagggctggaatccctggtgcagactgcacggtgagaggtgctccttgggatccactcgaggagcattactgctgaatgccctgccaggccaggagcatcgctgggggtgggagaggcagttggcttatttgtttatccaacagccatccatgggtaccccaagggccagctctgttctaggcactgggggtctaggcatgggctcaggagaaggggtagaacgggagggcttcctggaggaaggcttcctaaccagagaccggggtaggagtttgccaggcaggtgatgctggccagcttctcttgccattttccttttctttttttctttttctttctttctttttttttgagacagagtttcgctcttgttgcccaggctgcagtgcagtggcgtgatctcggctcactgcatcctccgcctcctgggttcaagcgattctcctgcctcagcctcctgagtagctgagactccaggcacgcaccaccacgcccagctaattttttgtatttttagtagagacaaggtttcatcctgttggccaggctggtctcaaactccttacctcaggtgatccgcccaccttggcttcccaaagtgctgggattacaggtgtgagccactgcgctcggccttctcttgccatttctgcagactcatagtgtgtgtggaagactgtatgtctgtgcctggcacagctgccctcggcactcaggtgggaggtgggggagagggctgttggtgccagcacaggtcatggcatgagacaggctcccgcagccaagcggggtgcaccgcagcattggaggggccctgctgcgcacgagatccaggctctgcatctgtcctcctccccaggaggcctggagggctgggagggaccagggtggtgaaataacccaggtgggagagaggcactgttggagaggcagagggagctgcaggtttgtagcagcgagctttaaaccctgggcctccaccagaaaacctcagaaagggctgctttgcttttttttctaaactacaaaagaaacccttggccgcctgggccccttggggtcgggtgggggaggagatccttcattcgcacctttgcaggcccagtactgtgcagagggaggagggtggaggcaaaggcgagggaggagggtggaagcaaaggcggggtccctccctagccccgctgccctgcctggttgctgctctcagacccctactcctggcccggaaacatggaatcttgggacagctggggtagggggcacagaacggagaccctggtgagggaggaactctttctccagccctggctgtggccacagcaaggccaggctgggaggacctcactcaaatatttacatctctcctaatatttaaatgatgaagcaggctcctgcacacagctgccctggagccagctgttgcctgccctaccctccctctctccctccctctttctttccctccctctttctctccctccctccttctctccctccctccctcttgcattctttgtctctgacccaagtccaggcccttccagctgttctctccttacccacaggcacctcctgtgactgagcttctccttgttatttttcataaccatttcctttaattgagcacctcctaggtgccaggccctgggctggtactttgtatacaaggtgtcttttaatccccacgagagcccaacaaggtagattgggctgctgaggctccagcgctggaaggccggcccgggtcctcccagtccgcacctgcatccatccatcactcccccactgtggagacctgttccctggcccctggctgagcacgatggaaatctctgtctactagtccttggagagtggggatggctgagggtcccgaccctggggtctgacgggggctgcctctgccccacttcagcctggctgctcttccactcaatgactgagtttgcaaaaccagaataacagtgctacctggctggtactttgggtggctgggaggcgtgggagagggtgcacggaggggctgagcgaggtgtcagcatcgtggggatctccgagggtagccttcccaggcccagggcggagtgtaggcagagggcgcgatggcccagcgtgccggctcacatctggccttgcccttgcccacacggcaatgtgggggagtcatcagcctctcagtgcctcagtttcccatctgtgcaatggggacaagagtaaatcactgtcttcaggtatggtaagcactcatacacattgactattgcagaatgaacacagtgagcccttcttaggcttctactacatgccaggcagggtgccaggccctagtggagaggggacaatgatgggcaagctggctcctgccctcaagggctgtcgagcagggaggaaggcggcggctgccctgactgtgacccggagtggggtgattcgcaaagaggctggcgggaggctggctgggggctggctgggggctgctccctctcctgcctgtgttccgtggcagggtattaaactggcttttttcatggatttccgaggccctgactgtgggacctcgggcaggttttgggaccttgtgactttgttcccgcttgtcattcaggcctttgtcctcagcagtgcccagcacacggcgacttctgcatgtccttcagtgtgtgactgaccctggagctgagacttggcagctgaggctggacattgtccttggataactcccggggaggtgggggcagggtggggctgtgagctggcaactccgagtccctagcagcctccgaatggaggctttcctcttgtaggattctcggggaggaaggaggggatgggggagatgaggcttgtgagtcttcaggagggcagaggttcacacctgcagcgccccagaaacactccggggtgcccaggcttacccagccctcctgagccagaaccaccaagagttggggaccagcagtccattttttagcaagatccagaaatgattctcctgaacagtccgagccaagaatgacatatctggaatcagaacatcagaactacagaggaatcgagagaacgggcccaaaatgtgtagggacctcagccacatggcgccacatggaggaaagcacccaacatcatcactgtatgaacctgtttaaacacacacacacacacacacacacacacacacacacacacacacactccccagtaaagagtggaaagacatttgtcagaatattgatggaagttacctgggttgtgggtttatagattttttccctttgtttttgtgcattttgcaaattttcggctttgtgcctaaattccttttacagtcaggaacaaagcaatagatgttattttttaaagttcatgggctcgtgcccgtaatcccaacactctgggaggctgaggcaggaggattccttaagcccaggagtttgagaccagcctgggcaacatagggagacccccacctttttttttttttttttttgacagagtttcactgtgtcccaggctgaagtggcggtggcacgttcttggttcactgcaacctctgcctcccaggttcaggtgattctcatgcctcagcctcctgagtagctggattacagacactcatatttgtaggatttgagaatcctacaagaggaaagcctccattcggaggctgctggggacttggagttgccagctcacatattttttagtagagacagggtttcaccatgttgaccaggctggtctcaaactcctgtcctcaagtgatccatccatctcggcctcccaaggttccaggattacaggcgtgagccactgcgcccggccatgggagaccccctcttaaaacaagaataaaaataaaaataaataaaagtttactgtcaaaaagaaaaacacatcacccaacctaatctccccctaggattgagagatgaggaagcagaggccggaaagtgtcacattccctggtcgctggcagtcaggggacctgaggcctgggctggttttctcgtgctccaggcctggggtgtcaggtggagcccctgctttgcccaaaggtctaggtgcctctgccagcactgcttgcttctgcatttttggccacaaggaatgtgggccaaaggcagggtccttgacctctgcccaggagggtgaagtgggctggtcctccttgtccctgctccaaggcccctgcggctgtgcctttggaaactgctggcccgagctagtgtgcggagctgggacagacctcaccgtggccctcgtggggtcattccatgtccgggctggaagggatctttcggtccagcccttcctgttcctcatcaggaaactgagaccagagaggtcatctgcctggcccggggtggggtgtagatggcgcttgtgactcctgcatgccacgtgcagacagtccctcagctgtgggcttcccacgcaagcagccatgctggggataacttggctgaaacctgcgatttaatgaagagaagaatgactcctcctgcagccctgtgccccacaggctccctcctgcccccacccctcctgcagaggggcctcatgctggtgggtgggtccctgttgctgcaatgggcccaggcagtttctgggcagtggaggcttggctgtcttcctgcccaatgtcccctgtagcccacgctgtccgggaagggcggggaagcactcagccactggggacttcacaagatgggtatctgggagatgctgattggcaggccaggctcccgtggcccacaggcaggtcagaggtcacagtgctgagctgggctgagttggcagctcagggcagtgggggtgggggtaccttgctcagccatgggcctctctggcacaagggtttggagtttactgtaaacaactccttcagtttttccttctctcataggccaccagcagaattgaggggccctctgttgatgaggtgtggcctgggaggggctagttgtctgtccacctgatccttgcggacaggtgaccacaggcttcctgccccagggggctgggggaaagatcggggaggcctctctggcttccccacttggaaggaaaatacgggcataggggagacactttacagggacacatttcagccagtaccctctggctgtgctgggggcacagtgcctgccctgcccacaagaggggtcagttctctccaggatttaacttcagccttcagtgcagggcagatgagcactcagaggcccagaggactcatatcacgagagagaagctgtgaccacacaggcactgaaggttaagcagaagagtgggacacacgggtgacctgaaagtcccagggtcagtgtggttagccccagatagctggggagctttgggtaccaggcttagcaggggaggagggcccccgtgacagtttgctggggctgctgcaacaaagccccacgaactttgggggctgaagatggttctagaggccagaagtccaaaatcaaggtgtcgaccaggctgatcctttggggcctctgcgggaggctccggcccaggcctctctcccagcttctggtggctcccgggtgctcctgggcatgtagatgcgtcacgccactccctgctccgtcttcacatggccttttctctgtgtctctgtgtctcgtaaggatgcttgtcattgcatttagagcccaccctaaatccaggatactctcctcttgagatcctttattgcatctgcaaagaccctattccaactcctgtcacattcacaggtccgagggctagggctctggcatgtcttttgggggtcactattcagtccactgcggcagctgatcttaggggaagcagaatgttctaagcttggggtgagcggagggaacgctgctgggtggggagtgggagaccaggctcggagacaccgcggatctcctctgtctgatgagggcgtgatgaggttctcatctcaggtcctctgaatggcggctgcttctgaggagaccctttcccctggatctgcccctccagaaacctccacttaggtccaggtcccaaggtggatggtaagaggcggctgtccctgccacacttgatgggtgagtgtgtgaacggggctgggagcaggacacttgtcacttctgtggacagattccagaggctcatgaatctgctgctggggaaggtgcctgatctagcctgaccctccacccccacctcccccttcccgccccccttcaccagccctgttcccagagcttcacttccccaaaggcaggcgccgtttcctggacttctcagcagctaccccctaccccagacccctctcttgtaggcccctctggtctcagcgcctactcctccctgggcttctgcccctctaccgtgaggcttctgggcagaagtgtggggccccctcgctgtgtctggctctcgcggtataccaggggtcctcccaggggcccgccctgcccgctaggtttccagggagcttttcaagttcttagatgggcttgatggagtttcccaatgcgttgtctcagagcaggaggggccccggctgagtccgagagtcccctcagtcacaccctgggctgtttggggcagccaggcagcccgtcttctggaggtgctgcctctctctggttaccccttctggaatcttctgcgtccagttgcggcccctcctacacagcacacccaccacccccttttacctgtgactcttctttgtcaacctcttcatgtctttgagaatggagaccaggtcctcctcaccctggagttcagcagaacctaaaccaggcagatccgtgtaggttcacgtgggggctctgtggccactgtggctctgccgtcacctccagcccagcttggcgcgctttggatcatgtcattcagtgccggtcctccaaacctctcccctggctctgcaggtctgggaagcagctggctcctgggtgcagctgtgaccggagcctgaactctgctccctggggtcaccgtcccctgtaattaggctgcagctcatattggctcgggcagaggccatcggctgcccgccttggggccacaacacagagagccccgtgattaatggaggctccacctgggccaagtggcccctggtgttaggcgcttttttttttttttttttttttttgcattttttaagtgcttgtaacatttcccctaatggacaatgagacgaggagggagggaggggtggcttctctgcccaggcagatcaggaatggtcaccgcctgtgtgtgcagtgacaggtctgggaacagacaagggagagcttgtccgggaggctggaccctcacaccgatgctgcctgtgcctggcagctctgtcccgggcctcagaacagacactgaccaacacgctcctcagggtctccaggtccgggtcctggtccccggcagagcttcccatccatgggaagaagcaccgagcagccttgctggctcctcgcagggagctgggatgcatttctaagagcagcatgcgtgaagcccggggtctgggcaaaggagtgtttggggaagagtctgctgttgttggagggtcggaagtagaggggaaggaggggcacgcggtaggctgaggaggtggctggcgaccctgtggtggggacgagggggctatgagcagaccaggagccagcatcacgtttctctgtctccagaatcgaggacggagagctgccagagaggccctggcggggtgtctggggccacctaaagggcgtgggtggattaaagctgaggaaagcctcattttgggggactccgtacttaacctttgaggccctcagagctgcagcctgtggtttttcgaagtcaatcacctcccagggcctcgctcctgccttcagcgacagccatttatcagggagtctttgacccaaggagacctgaaaggtcatctggtccctctcctacccccaggcaggccacacctagaccctcccacacagatccgtcccacccttctgctgccttccaccagggacggagggtgggcggccctcccacccaggccctggcggccccaccccagccaggaaattcttcctctttatctgcctcacatctcttcccctgcggcttccgcccatttcccctcaatctgctcctagtggagcagccagcagctggtttagaacccgggggtggggggagcgctagaccagtgcagcacatctgagagtgtgccagaggtgctcccattcccatagctgatttagtaaagaaaagaggaagtccagcaacttagcgccactttaaagtccgcctggaatgaccctgtggctgccggaaccaggggcacgcggtagatgacgggagcaggcacagagaggccttcgtcccggatcagtcgctgttgccctcttggaggctgggctgcctttcaagaagaggacccaaggccctgtgagcggtggcctcctctggagcctttactgtggtcctggttctgctctgcgtaaagagagatggcttgaagcagaagctgctacgtggctgtcccaggcaggcgcccgtagtcccagctactcgggaggcggaggcaggagaatggcatgaacccgggaggcggagcttgcagtgagcagagatggcaccactgcaccgcagcctgggcgacagagcaagactccgtcttaaaaaaaaaaaaaaaaaaaaggagtagagaaatctttcccagaaggcctgcagtcacctccccttcatgtttcagaggtaaaaaaaaaaaaaactgcacatttcgctttttttttttttttttgagacggagtctcgctctgtcgcccaggctggagtgcagtggcgcgatctcggctcgctgcaagctccgcctcccgggttcacgccattctcctgcctcagcctcccgagtagctgggactacaggcgcccgccaccacgcccggctaattttttgtgtttttagtagagacggggtttcactgtgttagccaggatggtctcgatctcctgacctcgtgatctgcccgcctctgcctcccaaagtgctgggattacaggcgtgagccgccgcgcccggccacacgtttctgttcttgaacaggtggctccctgaccctgggtgtggttactccaagaccttgctctggtggggcacaattctggccccaggtagggcgaccgtataacttactgtcccttgggggacacgttagtgaaagggacccttgaatgactacggtgggacaacagatgtgagctgggtttgtcccaggaaggctggatgtatgggcctcttgagccagaggagacaacagcagaaagctctgcggctgatgggaccgagcaggagaagggccggcggaggctggggcaacaacgcacttgcccactgtgaagggcctgtgtgagctgatggctgatgagagggcagtggggcgaggctgcctcctgccaggctagaccagctccaggacacccatatctccttttcagaaccggtgactcagtggctagaaggggcttcagaattgacgggacactgagggagtcgaatggaatggctggagtggccacagcaggctctaggcctcctcccgtttcttttctgtgttctgttcctggggtctatatcctggggttgctgtaacagagtgccacaacctgggggcttacaaacatagcttccggcggctcctggagattcctggcgttccttggcctgcagacgcatcaccatcatctctgatctctggcccctgtctccacgtggctttctccccctgtctgtgtgtctttctccttttctgtcttttataaagatgctcaccattggatttagggcccactaaattcagaatgatctcaccttgagacccttaccttaattacatctgcaaagatccgttttccaaatgtgatcatgttcgcaggttccaggagttaggacttaagacatatcgttttgggggacactgttgaacccactacatttaataaacccagagttggtgccaatgtcccctgcggacaccatagcagattctggaggttccttgtaaaggaatccgtaggacttcttttcccttctggagggatgagactgtagctgggctggggaaagctgctggttcaagctggggctggttcagctggtgctggcttgccaggttgttagagagctttatccagggagaaattaacatcacaaagttgggggataagagaaggtttggaatcccaagggctggctgttgaggtcagctgcccacccctttgtgttccatcttacagggacccaggcctgccagtgctccgtttctggaaggaatgctgtgggctgctgtgccccataggcagggtggagggtccccttgcagccagcgagctgctcttcctgtagcgtgcagagggaaggaggaggcttgtttatttctcttggcctcagccgaaaatccaaccacaggctctggcactaggcagacctgctcattctcacatcatcattgcagagtgagccaggcctcttgggtggggctgtgatgagcaggaaggacctccggagtgcctgggacttcttgggcccagggttgccagaggcagagagaaagaagcctcctcctaacacttgagcaaagatagtcatcagaatccatcagagtggcctcctgtggctcttccctgggtgctgacccccctggtgcatttgaagttttcagggatactattgacgctccctgcacctccatccaggggttagtggaaatggttcttttcctccttgtccagaggtactgtggatgatgaccccaggtcccagacctcagtcattgggccacgtgtgcagataagcctgggcagtcagtaacctttggccaccaagctggcctcctgcggactgggccggcactggaggcgggtcttagctgctagcactgtggcccagccaggcctggccttgggaaggcagagggggaggggactgggaaagggattgagctgggggtggggtggtaccctggttcttccctcccagacctttggcaggtttgaactatctggctgcggctctctaaggagggagcgcctcctccgccttgatgtggactttgccttctgttcacgttgtccctgtccctaaacaaatgtggctctctgtggggagcctgggggccgccctccactgacactgctgtttcctggcttccctttgcaggctccgctcagcttcactgcgcctatttttaagcctttccttttggacggttttgcttcctgagaacacacccctccccatcaccccaactgtgtcctcctccctatccggagcctgctccacctgccccaggagccacctccctcctccaccaagcagcccaggccaattctggagggctaatttgtgtccctccagaagcaggtcctgagacagggatttcagtgggaggggacaccaggggatgcctgagtgtgggaatgggccaggcagggaatccagccaataaagggtgcctcaccagctcattgtgaccacaggtggctgcccagcccccataccgggcagcatggggagactgcagaccgtgcccccagccttgtcccacctggggttgggtaagggagctggggtttttatacttcagttcttggccaaggactgcactgctcactccttccagccttccgagggcttgggcactaggaaaggctctgggtggagacacggaaataggccatgtgaagtcagtgggcgtgattggtagcagtaaggccaggacagccttggtcaccagcaaggtgaccacacatttcagcatgcacagcccccacagacacacacccaggagatggtaattacaccagcaacagtcacccctgccgcgtgccatgcctgcacccagggaatcttattttttatttatttatttatttttatttgagatggagttgcgctcttgttgcccaggatagagtgcaatggcacaatctcggctcaccacaacctccgcctcctgggttcaagctattctgcctcagcctcccgagtagctgggattacaggcatgcaccaccacgcctgactatttttgtatttttagtagagatggggtttctccattttggtcaggctggtctcgaactcctgacctcaggtgatccacccacctcagcctcccaaagtgttaggattacaggcatgagccaccgcgcctggcctcaggggcaccttattaccccatcacctcctacagcaggtgacactgaggacactgaggctcagagtagactgtggttatgtcactctcctgtttggttctcctgctctcagccctgaaataaagagcacggtccctgtgcaggcccatacgtcctgtctccagccctggagcagtccttaagctccttgaaggcacaccaggcctttgggcctcgtcccccaagtcctggataaataggaggtgaaggagcctttgcaactggaccccactctgccagcgccaaggccctgcctgactacccaccccaccctacacagatcagggacctgtgccaaggtccagtgtcacaggagagtgaagacaaggaggtgcccatggcgtacatgctgctggactcactctgtagatcctaagggttatggggagttatctgccaggtgaggttttcccgtggctttttcctgcaggctcagggtagcatacagggaggtgcttccctactccttggcaccatctgtccggcttccctgagccctgaccctggctcctagatagccagtgtttcttcagggacagaacctgctttgctgctgctcagaggagacccagtttgaccagggctagcgttcctggaacctgagcctggaattccaccctgccctgggcagaggccacgttgctccctcctacgagagctgagctgcgcatgagattattctgaccttgggctctaccatttctttgcatgacatttgtcccaggctggagcagggctctgtggctcgcttggtgttccctccccagactgaggcctgatatgtacaccaggaagtgcttgatctggtttcaggagctgggagcggtttgccaggcagcctgtggtcagagcaggggccttaacaatggtcccttgtgcggcacattcctctctaaataggcccaggtccaggctgctcctgtttcgaccccgccatgggcctggaggggaaagtttgcatctggagggtggcccactgtggcctctttttgtgtagcagctgagaccgtaggtgcttgagaataggagaagccctgtgcccatcctgggctgtgagatgtttttccagaggtggggatggggatgggccagcatgcagttacccacaccctccagcttgttggcatcaaggtctgtgtatgtgtgtgtttttttttttttaattttgtttttccaacatggagtcttgccatttgcccaggctggtctcggactcctggctcaagcgatcctctagcctcaggttcccaaagtgctgggattataggtgtgagccaccatgcccagccagtaccaaggtgtgttttttaagagcaatattggccgggtgcagtggctcacgcctgtaatcgcagcactttgggaggccgaggcaggcggatcatgaggtcagcagattgagaccatcctggctaacacggtgaaatcgtgtctctactaaaaatacaaaaaaattagccagacgtggtggccgggcacctgtagtcccagctactcgggaggctgaggcaggagaatggcgtgaacctgggaggtggagcttgcggtgagccgagattgcgccactgcactccagtctgggcgacagagcgagactgtctcaaaaaaaaaaaaaaaaaagaacaatatcgatggttttattccctgaacatgctaagtgatccccatgtagtataagcatctcagaaggcaggaaaatgtaatgaacaacacccaccgccattcattccatccagagatcgttattttctgcccgggtgtgagtgtgtgtgtgcgtgcaaactgcacatgtgtgtatgaaatggaattaggatctttgtatacatcttgtgtcctgctatttttacttaatattctcggcatttctcatcttcaaaaatgtgattttaatgatggtgcaggcctttgacatatgggtttagaaaatctgcggaaacccggactgtttccaggttttgtcagtttaatgctgatgcaaatgtcctcgtacgtaaatctttctgtacttctgattatttccttgggataaattcccagaagtgggccaaagcacatgaacggtcttcaggcttttggagcaagttgagatcggtggggattggagaagggacccagggaggcttttgggagcttgcgagattggagtctggctttaggggacttgaattcacagatgaaggagatggctggcaaaggtgggaacctcctgctctatgggtgggggggtgacactgctttaccttccagtgacagcatggggatcctcccaacatgacctggctccgcatctttctgacactgtgcacggtccacagttgtgatgctcagctgggagcctcttctgtgtccttcagttgcattaactccttgcagacagaggaggaagctgtccggtgctcctccctgctgcgtgggtcctttgaatctgcccagttgggcctgtggatctgtgcagtcacgtacggggttctaaaatctgcaaaatgacaagctcacgaacactctcgcttctgtgggtgaatgtggataccccttggctgcgtctccctccacagggaagatggagacgtgtaaagtgacaaggacctgctacccctgggcaggttatgccggttccactgtgaggatggtggcagggggcttcccaggaggcctgcacattgggaagagaggggcgaccgtgtgtgactgcaggacccagggcgcagtcttaggactctgatgggggaggagatgctggggagccctgttctgccagcctggtgacagacatctcctaatgtttcccggctgggtacaactcacaatgtcctccgtggggaggcaattgcccatgaggcatccctggcagggatgatcttgtttcattgccacatatcccagcaatgaaacaagaatctagagtgatgtgattcctccgatgacttctccaaccatctggggtttttgtgcgactccaagaagggggaaggaggcagctctcgctcctctgggctcctgatgtggcagctctggaatggccacgtgtccgttggcccacagtgggccatttgtcgaatgtggttgtggtgggattggggctgggctggagagtgggtgaccacaccagctagcctcaccctgggccactgtgcagccaggggtttcatcttcccaggggtctcgttgtgagtgtcctggggctgctggaacaaattactggaaaccaagtggcccaacaaagattgattcgctcatggttctggaggccacaagtttgacatcaaggtattggcaggaccacactccctccgacagctcgaggggaggacccttccttgcctcctccagcttgcgttggcccaggcgctccttggctctggcagcatctgcagtctctgctctcatcacgtagccctccccaccgtgtctctttgtgtcccaagtccccttctgcctttctcctataaggacaccgagcactggatttagagcccatcccaaatccaggatagtctcatcccgggatccctaatcacatctgcaaagaccctttttccaaataaggtcacattcgtgggttcttggggttaggtattagacatgtctttttgggggtcactagtcaaccctctacagaacctcagacgaaagtgaatcttcacaggctgaaatgggggtgaaggtctagtgcgtccctcctccttgggagctccctcagggcttgtgcctatcctgtgatcctgtgatccagccttttttttgagatgaagtcttgctttgtcgcccaggctggagtactgtggcacgatctgggctcactgcaacctctgcctcccgaatttaagtgattcttctgcctcagccttccaagtagctgggattacaggcgcccacccccatgcctagctaattttttgtgtttttagtagagacagggttttaccatgttggccaggctggtttcgaactcctgacctcaggtgatccgcctgccttgggcctgccttggcctcccaaagtgctgggattacaggcatgagccaccacgcctggcatttagtaggttttggttgttttttttttttgagacagagtctcactctgtcatccaggctggagtgtagtggtgtgatcatggctcactgcagccttgatctcctggcctcaagtgatcctctcacctcagcctctcgagtagctgggattacaggcatatgccaccacccctggccaatttttgtattgtttagtggagtcggggctttgccatgttgcccaggtttgtcttgaactcctgggctcaagcgatctgtccaccttggcttcccaaagtgttggggttacaggcgtgagccaccacgcctggcttagtaggttttctagaagcgcctgaggcctggtgaaggcatggtgtcatggagtagagaacattcaactctgttcccggggagccggaacacacccctcgtagccaatctcaacagtcatgacgtggccaggatgacatggggagggggtggtgtggactgtgtgggaggccagctccccgggaagggggctggagtgggcttggctttgaggaggattcccaagaggaggaggaggcggtggcatgctcgtttggggggatggcgtgagccagggtgggcacctcttcatttaggtgtcaccttcttgacattccagccgggacatggtttccttggggaagatggacacccccagagtggggcatctcctggggaagatggacacctccggaatggggcgcctcctgttctcactgttcttctagcacacagttgtattctcttgcagttctggaggctgtgagatctcctggctgttatctagaacaaactcgcctttgagcagcgccgtcctgatggtggggtggcccctgcgggtggaacagcccctgctgtctcagagcttactgagagctagtgggcatgggagtggtgctggaccgaaacacccagagggatcatagagccaggcagtaagcacagaggccagctagtggggagggagggacccatccatgaaaagacaccaagcattgaaagagaggagaggatggttggggaccggcacacatgtgcattttgcgcagatggccaaggtggtgaggcgccagccacgcagacaactggaggaaggaggagtgccctaggggaggggccagctccggttctagaatgatccgcttgtgcacgtgggcctggctggaataaatcattgcatccgcaccgtagactcaatcgtaagctcacaccagggcagcctctgctttggtgcagtgtcttcgatcatgagttggccatggtgggggtgactccaaggggactcccaaggagggggttcaccggatctcccagggaaggtcatttgttttcttgggttggacctgggacaaggccttctcctgtctagtttctgttctccaacttgaccgcacggaaggatgctgaggacacctggaagccggcccctgctctacagcacccataggacagaggcacaccatgtggggacagtttggacagtgctcaggaggcagggagcagatcagaggaccgcgggaggccctgggaaccgcacgaggacccaggcattgagctctgcactttctggcatcagcccgatgtacagtctggctctgtgtctaccccgtacttcactttccccatctgtacgggggcggtaataatattctttacagcccaggtttaagcgggtgtagatgtgatgagcttggtaagcccatctcattacattcagttctgggcattgaaccctggactttctggctggtagaagtggacattcaacctttccttggggccctggggcttctgcagaatcagaacacagccagcagtttgcatgcagggtgcagagggacagagggacaccatgtcgggagcccacacctggcacacccctgactctggggctcagtgtcctgctgccctgcggccacgtgatcagctagaggtcatggctggacccataggcgaatacagcctgtggatttgattttgtttggccctgcggtgttttattttatttttagttttagtttgtggagacagagtctcgctctgtcagtcaggctgagtgcagtgacacgatctcagctctgcaacctctgcctcccgggttcaagcgattctcctgcctcagcctcctgagtagctgggactataggcgagtgtcaccatgcccagctaattttttatttttagtaaagatggggtttcaccacatcagccaggctgctcagtgttttaaaaagggcttgttttgctttgtgccagcatttaaagatcaggagatatcatataaagatccagatttctactctcttgagaagtgaacagctctggccacgccgggcccatatcctctagggcagtgacggagctgagacagggcctgtgacaactgagagttctctggagtccacacggctccttgcccagcttctggtggaggttgagcttagtgacccaggatttcgtctgtgtccaccaagaaggagaggtgcctgtggcttagagagggcgcccacaggagtgccttgcccaggaagctggcagctgaggcggccagggttagggggttgggcttcctcttcccctccccagtgcctgagtgcatttggaggaagagagacgggtgaggggaaggcactgaaattggtcctggagcgctattattgggggctggggaccagctgtcatcccttttcctgtgggcaggggaggcagtggtgggatcccatgagacccggactctgtggcctggtgaggcagggagcggctggggagacactgtgggtctccacaggggtgcgctgtgggtctggcctggggaaggagctggtgaatgtgcctgccatgtgggtccctccctgctctggccctgataaccaggagcggctggctctcatttggagtgcggttgtggggactgtggaggtggcagcttcccaggtaccatccccactgcctccgagggagcagaccctggtggagaggcaggatggctgcagggcgggagctggtggttggcatcactgcacgggcttgtagtagtggatgggaagatgcaggagaggctgatgactgagaaagttggttcctgtggactaagctgggggagccggacaaccaagtggttagaaccttgggctctggtatcagcctgatgtacagtctggctctgtgtctaccccgtgccccactttccccatctgtactgggggtactggtattctttacatcccagggttaagcggctgcagatgtgatgagctcggtaggcccggcgcctcgccggcactgaaagctccagtgtccgcccttagtgtcattgatggggttttgttcctgctgcggttctgattggttacagttgcggtcacttattattggaggcatgtcccccgctgtggctgatggtagaggtgtgtttgctggtggtgtcccagtgtgtgccttggctggaggtgaggagggataaaaacagccgcgacaagaaggaaatcaaggccgggcacggtggcgcacgcctgtaatcccagcactttgggaggccgaggcgggtggatcgcttgaggtcaggagtccgagaccagactgaccaacatggtgaaaccccatctctactaaaaatacaaaaattagccaggcatggtggcccgtgcctataatcccagctactggggaggctgaggtaggagaatcgcttgaacccgggaggtgccgctgcactccagccagggcaacagagcaagactccatctcaaaaaaaaaaagaaggaaataaaagtcttctctggaactagaacgttcctatgtagacgtagctggagggggaggctgtgtggtttgcgccgtggccatggcaagacacgacgggcagcatcttcccactccagcctgcatctctgccccagaactcatgatggttctcctaggatggggctgtcccttccgcttgctgagacatgaaggacgggaagagacccccggccctcaccgccgcatcgcctgccttcctctgctgctccttagcaggaaacatgccggagtgttccctagccatccattcaccaattgcatcccctctctttatttttcagccttgaaaagatcttttgaggtcgaggaggtcgagacacccaactccaccccaccccggagggtccagactcccctactccgagccactgtggccagctccacccagaaattccaggacctgggcgtgaagaactcagaaccctcggcccgccatgtggactccctaagccaacgctcccccaaggcgtccctgcggagggtggagctctcgggccccaaggcggccgagccggtgtcccggcgcactgagctgtccattgacatctcgtccaagcaggtggagaacgccggggccatcggcccgtcccggttcgggctcaagagggccgaggtgttgggccacaagacgccagaaccggcccctcggaggacggagatcaccatcgtcaaaccccaggagtcagcccaccggaggatggagccccctgcctccaaggtccccgaggtgcccactgcccctgccaccgacgcagcccccaagagggtggagatccagatgcccaagcctgctgaggcgcccaccgcccccagcccagcccagaccttggagaattcagagcctgcccctgtgtctcagctgcagagcaggctggagcccaagccccagccccctgtggctgaggctacaccccggagccaggagggtgagtcgcagagcgctaggtcttggatgctgtggtaatggggggcctggttgctggctttgccacagaatcttggaggaagaagctggatatggggtggagggtgctaccctggagacccagaaagaccggaatgcatgggggtgggggtctgcaagctcaggagaggtggctctctctgtctgatgggaacatgccaagatgccccaagcgggacttgaatgagagtttggaaagattttctgggtttcaaggagcctcctttatgggtcaccgtgggccttgctgggacctctgtctgctgtgtgtccctggagggcctgggaggcttagagaatgaggagccacgcaggaaccagggcaggctcatgcaggggtgtaggacagggtggagttgagacccctagaagggctgtcacattctggtggctcctgcttgaggaattgcaggctgcctggatatgcccagcagaggccgagggcttggggaagggaggagggacgtatgcctcctgaggcttgcattggagcccatggtctggtcctcctcccccaggagggatggttgtggcagagggaggggaacatgaggagcaccttagcctgcaggacaaaattctcagggcactgggaaggggtgcctggaccagggggctgtgtgatagctgcacacggttttatttgggggtgcccttctggcgagaggagagaggccatggggctccagcagcgtcctgggagggctcaagcccacagccgtgctgacatggagcttacaggcaggggattggtgccagtcctgtgggacacagggcctgtttggaaatgccaggctgtgggacatggttgggtcccttctcagaagcgtgccccctggccccagcagggatcgtggctccatggggctatagtaaggtgccagctgggttagaagcccctcaagagccaggtctgattctgggcacaggatcagaactcagtaatgctcagtaagccttctttaggttggacaaacagcacagtctgggtttttgatttagctgctgcttcttatttctaaccgtggtgaaatacacaacatacaatgtgcaattttagccactttgcagtgtacgtttcagcggcattcagtacattcacggtgttgcgcagctgccaccgctgtccatctccggtacccttttcatcctcccaaactgagctccgtccccgttagaccaagctccccatgcccctcccccagctgctggcagccaccattctattttctgtctttattatgaatttatttgaccactctaggaaccttgtgtgtgtggaaaaatacaataactgcccattttgtgtctggctcatttcactcagcatgacgtcctaaaggttcatccgtcgtgctgtagcatggggcagaatttccttcctttcagaggctgaataatattctgttgtgcgatgcacttgtgttgtgtagctgttcctccatcggtggacccttgggttgcttccacatctctctaagtccctctttccatcttctttgacttttctttgacttttttgagacagggtcttgctctgtcctccaggctggcgtgcagtggtgtgatcactgcttactgcaacctctgccccctgggctcaagtgattccccagcctcagcctcccaagtacctaggaccacaggttgcgcgccaccatgcctggctaatttttaaattttttttgtagagacaggttctcactaggttgcccaggctggtctcaaactcctgggttcaaatgagcctcctgcctcggcctcccaaagtgttgggattataggcatgagccacccaacccctttttggtttttctttttgaatgagagttctccagtggtcagtgggcttgggggctgggaggatgtggggcctggagagggtgtgggtttggggggagaccagtgctcctcatgctttcatgggcatgtggagtgcacatttgtcttggcgggtctggggcctgggactctgcatttcctacagagggggcatcggaacacactgagtagccagaggctagtgggccttggaaggtcctttccggccctcagtgtgcgagtcccgtgttccctctcccatctctctaagcttgactctgaagagccaccctgccccagccacccagactcagtgacagtggttgctggtggcatggtgtcaggccaaaggcatgggcagtttgcagagtggcaggaggctgtttcctcccctgccttctgttggtgcaggacctttgtttgacgtgccggatacacccccatcctgggttgatgtgttcacactcagctgagtcaaacaggatgtggctggggaggcggttgtcaccgagccatctaaatctcggtgatggctggtgctggatgcacagggacgtggtcctggctctgggggacaggtagggggatgtccatggggatgtacaagaacattctcctccaggggcagacacagtttagcccctaaattgtgccagagactgtgccgggagccaggcccagggacacaacctgcgggctctgctttctggagctcaccgagccgtgagcaggatggctgggacacaaggagtgtccagggagcttccccagcagtggaagtacaatttcatcaggccaggaaggggagagaaaggcaggccacgtggaggcagcagcgttcagagctgccaggaacctggcgctctggggggacggtggctttctccatggaataggatgtacacgttggagccggggcatgggagaaaaccatcagcatcccagacccggccacccacggacagggacctgtgcaggtgggagtccagctcacgtggagaggtccgtgggctgggctgacagtcctgagggcctaagcaagtccaggtggaggaaatgcagggacagacgagggcagggccttcccaatggaggagtgctcttgaaatccgatgggagtggcttctcggggggcccaggcctgagccccactagttcttcctccgaggcaccacctgcttgcttctccgtcctccctctctgtgtcacgaccgttctggacacggatccagttctctccaactcagcttcctgcccatctttccttcaggcccatccccttctgcccctccatgtggggctgggctgggagttccctgagccccgacatgcacagctctgaccaatctctgcggcccctctgtcccccgagcaccagggatccagctggcaccatggggaaaggaatcatggagggagttccgtgccctctgagcagacgcccagccccttggcttctgcctgcgggagggcatctgtgctgtggtttgtctccaccccagagctgtgggtgcagggcagggtctcctggggccccagctgaattgctcccagactgacttccccaaagcacagcactgctgagatctcttcccgtgctgagccttctctgctcactcaccataggcccctccacggttgattcactctcctgctcagctcacacctctctccttcccagcttctcctgctttggtcttcccttggtctctcacacctttcctcacaacccctttgccctgacctcctgaaccctgacctctgcttctctttacatcactgccttggtgaactcctatgcatccctcaaaacctggtccaaatacctcgtgtttggcttgggatataaatgatttgtgtataaactttctttcctctgctagacttttttttttaaatgtgaaagtagtttttcagatcataaaaagtaatcgagtaccctttctttaaaatgcaggaagtacagaaatgagaaagaacctaaaattcacctgtaagccagcgatatccatgcttgaggttttgctgtatagtcttcaaaattcctttcatgcccccactagattctgagggtagggctgttgtctttgtttttttttgtgttttttttttgttttttgttttttgagatggagtctctctctatcacccaggctggagtgcagtggcatgatctcagcttactgcaacctctgcctcccaggttcaagcgattcttctgcctcagcctcccgagtagctgggactataggcgtgggctaccacgcctggctaacttttgtatttttagtagagacggggtttcaccatataggccaggctggtctcgaactcctgacctcgtgacccacccacctcagcttccctgacctcccaaagtgctgggatcatgccaccgtgcccagcctgtcttggtttttataaagaatcccataaggggccaggtgcagtggctcatgcctgtaaatccagcactttggaggccgaagcaggcagattgcttgagcccaggagtttgggactagcctgggcaacatagagaaaccctatctttacaaaaaatacaaaaaattagccaggcatgatagcatgcgcttgtagtcccagctactggggaggttgaggtgggaggaccacctaagcatgggaggttgaggctgcggtgagctgagattgtgccactgcactccagcctaggagacagagtgagaccctgtctcaaaaaaaaaaaaaaaaaaaaaaaaaatcccataagataccaagtaagtgacttggacataataggtgtgccatgaaattatgctgaaggagtgagccactggtggtgagttgggatggcttttttgtggttcttgtaggcagatgtagtgacccccatgggtcgtccctagagaccaagcagaaactttcctggtcaactttacccccaggacacctggtctctcctctggaggttgtgctggagggctcagtgggtgggtgttggcttcagtgtgggggttctggaaggagtcagcatttcaggagggagtgtgggcacctagatggttgaaggggagggagaggaagagaggcgctgcagagggcagaggcatccctgcctgctcctccgccccagggcctggtgaggtctgagctttatgctggtggggtggattctcggtttccgaggctctggccctgcccctggacttggcaccctccttgctgtcctcccacagaagggcgctcatcctttggggtcatccctggtcctctcaggctctgggtggggacggccttgcctcctctcctggatccctgctcttttcctgccccccaacatgggtgcctctgggtggagtggggtggggctgggctgcagcacccagtactgagcctgcaagggctggctgctggctcagagccccccccaccagagttacccccctccggctcctcagccacaccagccaagtttctccagagctgccttataaggcgggtgctcagcgctcgttcatgggtctggttctctgccttcttgggatgctcactgggggcaagagggaggccaggcccagtgcccagctcagttctgggcatgtcccagctctgccccatgagtcaactggttctgaactatcattccacccctcccagcctcaatttcttgatctgtcaaagaggcatctgcagaggtggctgggggctgagctctcatgtatccacccaccccaagaaccaagaagggagtccacagtggttctggggccacttgtgaacatggatgtgaaattggggcggggtagacatggcagcatgtctcagtagttttcctgtgacccagagggtctggaaatctttgtcatgtgggtggagcgttgagggagcagggggtcaggcccccccgagctgatgatggtgggcgtggctcttcgcatacttggtccgcaccgggccgtgtgttccaggggcagaacagggaggaatctcagcacagacagcagggctgccagtacagcgttgagtatagggttaatcaaagcacagggctccctggaaccacccaacacagagcagtgaagaggtggctttggggaaagtggggtcagagctgagcctgagtggggggtggggagggcgggcatcagcctgcaagggagggacacctactgggccccagaagttcctggtggggatcagggactgtgaagttggggagagggtgaccactgtgatttagggaggaagggccccatagacagcccagcttctggccccgtgtttacaggacaccccacataggctctgagcctatccctggactgtggactccctgaggcagggtgtgcaggttcgtccagtaccaggtgtaaggcagggggccttggtaagcgtcgagggactcactggtgtctgatgaagcagtgagtttggatcgtgtcatgcctcgggtcctgagcctgcaggatttttctgtggggctgtgtgcttctgcttctggaggtgtccagaaggcactgacgttcctgccgggatgccttactcggaaggtcccgctgctcccacctcctcccattttcctgagctgcttgcagagggcacccaggtccccttttactttgggattgggtctctttctctttccccttctaagaacaagtaccctccttctccgaactgtccctggagcctctcagacctaggtctagagtgggaagtcccgcatgtgctgggggaacaggaatcaatgcgggaggattggccaggcccggtgtgtctccttcgtggtgggacggggtggggccagagaacagagcctggctccagagcccaggaagagaacccctcccctcgccggcctgccaagcaccgtgcagtggtgagaggaaaggagggctggtccgggaatgcagcgggtgccgagcagctgtggaataccttaaatagagcgcagctgcggggaagggtggggccaggaggcaggcgctgggggcggtttctctgctccgccccctgcagctctgtggccctgaccacccagcctggccccaggatggagccccggcccccagacacatggcactgggtgaggccgcctctcagcacttgtcccaggaagtcagagcagctgccagaagagagaggagctgtgtctgtacccgccgcctcccaggcccgggacagctgccgggattgagggtctgcacaatggcgagcctgtccggaggggcgcgccgcggccagacagccatgctctgtgcggtgtggacagagggcacattcagccctggaggagcgcactcagactccccgcctcggggcccaaagtgtgggcagcccctaaccagaccctggattccagcagacagcctgggaggatgccatgtggtccaccctgacacactgtctcacctgtgacctcatttctgagagctgcagggaggcgcttcctcagttggactccacttcctctccggggttttctgtgggtgttataagtgactctgtctccttcagtccaaggggggctcctggggtatgggctgtaactgacaggctagagtagcccatggccagggctgagcttccttcccgttctctctgaacactgggcccaggaaggggttaaagtggagatgctctgattaaagttgagggaggcatggagctcccctgaccctgtccccccatcccactgctgctactgggtgtactctgtggagccccaggactcttaaagaacccagagtggagattcccggtctcatccagtgcaggtgagggggaaagtgatttgtccacagttacatggctaccatcagcacacctgggtcaagctcgattccactccacggcccctgtctgaaacctggaactggaaatggccctggaaatcactgattccatctgccgccttccaaaatggcccgcagaggttaagatatagactcctgtaatgccttgcccactcgtgtgtggggaaatggcagaggagcaccggctttgccctcacactgcctgggctgccgcccctgccctgcctagtggctttcctctctggtccgttttctcattgtggaagtgggcacaattcttcctgtgcagcgtggttagagtggacagtgatgattcgtgaagcagggtggagcgcctgggggattcgtgttaaacaagcacataaacaaaagccaacacaacccttacttaatcagcaagcaggccttgtctgaagcccctgggcagcacctcatgccatccctaggttccaggccggtggtgtcgccccgtgtctctctcacccgcaagctggtgtttagaagccctgctctgtgttctggctcccattctccctgtgacctttccctttcttcatcctaaaaagcaatgcacgacggggcgtggtggcgggcacctgtagtcccagctgcttgggaggctgaggcaggagaatcacttgaacccaggaggcggaggttgcagtgagctgagattgtgccagtgcagtccagcctgggcaacagaacaagactcccatctgggaaaaaaaaaaaaaagcgatgcccagtcattcttagatagaaaatgaagatcacatgaaatttggaaagaagtttttctctcccattccccaactctctcccaaggggtggccatgttgacagctgggtgtggcattctcctgaattttattcctgcagagtcattcagggcttgtgtaaaaaaagtcaatgtgtaaatatagacttttcaagaacacaaaggaaatcagacttctgctaccagcttttattttttccatttaacaacactgttgccacttgtagatgtagcacgttcctttttctttttctttttttttttttttgacagagcgtggcccaggctggagtgcagtggtgcgatctcagctcactgtggctcactgtaacctccacctttcgccttccgctttcaagcgattctcctgcctcagcctcccaagtagctgaaatcacaggtgcttgccaccacacctggctaatttttgtatttttagtagagacggggtttcaccatgttggccaggctgctcttgaactcctgaccttgagatccgcccacctcggcctcccaaagtagcacgttccttttaatggttgtgtcatcagctgtcccatggccctgccaggcttgtccagcttcccactgtgattgagaggctgcaacagatgttctcgcacttgtacatgtgcacacatgactgaaggatgagctcttagtgaatttctgtgtcaaggatgtgtgcatttaagttttgatctgctgggcacagtggctcacacctgtaatcccagcactttgggaggccaaggcgggctgatcacttgaggtcaggagttcaagaccagcctggccaacatggtgaaaccccatctctactaaaaatacaaaaattagctgggcatggtggcttgtgcctgtagtcccagttactcaggaggctaaggcaggagacttgcttgaacccagcaggcagaggttgcagtgagccaagatcgtgccattgcactccagcctgggtgacagagcgagactccctatcaaaaaaaaaaaaaaaaaaaaaaaattgatccttgttcctgaattggcctctaaagtggttactagaattttttaggacccctcccctcgtcgacctgctcagctgtctgctgggccctgtgcagtgatggtccagcagggaggtcctatgccccttacccctggctgagggccaaatgctctccaattggtgttttattttgtgcatctcggtcaagcgagagggattatctcttcgtatgttataggccagggccctgtgttctcttttcatttggaaggtgtatccttttcttgttgaaattttttaaaaagagttctttgtaagccaggcgtgatggctaacacctataatcccagcactttgggaggctgaagtgggcggattgcttgagcttaggagttcgagaccagcctaggcaacatggcaaaaccgcatctctgcaaaaattagctgggtgaggtggtgcgcctgtagtcccggctactcgggaggctgatgtgggaggatcatttgagtctgggagtttgaggctgctgtgagctgtggtcataccactgcactccagcctgggtgacagagtgagatcctgtctaaaaaaaaaaaagagttatttgtacatctttatcacagcaggtacgagtatcttgtccccagctgcctacttttgattttgtttctgggatgttcttctacacagaacattttaatcctgatattgtcaagtctctgctttcccttttagcttttggaattcacatcctgtttagaggtctcctgcgttctgaaattataggaaagaatttcacccacgttttcttctagtacttctgtggtttcatttttacatgttgaaatcatgaatccattggaatgtattttggtttcagcagcgaggtaggggtagatggtattgcttggatacacagcagcgagcttggtctggagcgggtggggcgtgtgtgtgtgtgtgtgtgtgtgtgtgtgtgtgtgctatttttatcagttttggtgtctgcattgtgctggcttagcaaaaacaatttggatgcatttcttttaccctctgccttctggaacattttaagcagcaacataataatctctctgttaaaacttttcaagaattcactcgtgaaaccatctgagcctgatacttttgggggagtctagcactttaaaaacttaaactttttccatgggtctgtgagtttgggagtttttctttcttcttaaaattcattactatttttttcctagaaaagtgtcttttagcttatttaaaatccgtcagcttattccgagggggttgctttagctcgcttagtgaggacagtgtgcagcgcggtgattgacatgattgatcagcagagcacgatcgatcagtcggtgtgcaaacatgactgactgtggccagcgtcctgggatgctccatgttgaggcacatgtgtgcagtgcagggtgatgtgtattctgagaggggatgaagccacaggacccctgcacccttaggagagagcccccctccccaaggctgcagtcttgagtaggtagtgacgggactgggtctagggggctgagtggtcccagcaggccaagggcttcaggaattatgagaagtttggagttgcccagagagcagctttcaaaaccagtctggactgcagcctccagaaagacatgcgattgacaccacgaaccaggacacacctatatatggggtgggggtggggatgggatgtattaatgaaaccaaatttccgtgatggaattcttacctttaccatgcgtgtgctacactcagtattttctttttttttttttttttcccctctctctttttttctttttgtttgtttgttttggagagagggaaggctttttttcatttttttttaaacagctttattgagatccaagtaagctactatacaatccaccaatttatttatttatttatttttttgagacggagtttcactcttgtcgcctaggctggagtgcagtggcgccatctcggctgactgcaacctccgcctcctgggttcaaccaattctcctgcctcagcctcccgagtagctgagattacagacatgtaccactacgcccggctaattttgtatttttagtagagacggggtttctccatgttgaggctggtctcgaactcctgacctcaggtgatccacccgcctcagcctcccaaagtgctgggattacaggcatgagtcaccgcgtggcccaatccacccatttaaagtgcataattccatggttttcagtctattcagagagtagtgcaaccatcgtcaccacaaccaattttagaaaattgaaaatttgagaaatttagaaaatttttttcttaagaagaaaccccgtagcctttagctatcaatcctgccctcctcctccatatttccttcctatctgtgtggattctttttttttttttttttttttttgagatagggtctcactctgtcacccaggctggggtgcaatggctcaatctctgctcactgcaacctccacctcccaggctcaagccatcctcccaccatggcctcccgagtagctgagactacaggcctgtgccaccatgcccggctaatttttgtattttttgtagagatggggtttcaccatgttgcccaggctggtcttgaactcctgggctcaaatgatcctcctgccttggcctcccaaagttctggaattacaggcgtgagctactgcgcctggccgattctagacatttcttgtacagagaattgcacgtttggcctttgtgtctggcttctccacttggtgtcatgtttccaaggtccatccacattgtggcaggtgccagtgcgtccctgagtaatattccaccatggcatggaccattccattgtggacagacatgttgccttcatcagctgagggacattgggttgctgccaccgctggtgagtgtattcttttcaaattaaaaaaaaaatgctggtcaccacccactagatcgttttcttggcccacagggtgggacaagccggcctgggtgagggccaggaggtggccaggtggaggcggctggagcggccctgggttgcctctgggcgcagcaggcagaggtgcaatggcagagtctgagcaggttccctgggcggatctccatgccggtaatgtttgtttattcaagaagtctcggccaggcgtggtgcctcacacctgtaatcccagcactttgggaagttgaggcaggcagatcacctgaggtcaggagttcgagaccagcctggccaacatggcaaaaccccgtctctactaaaaatataaaaattagctgggtgtggtggcgtgtacctgtagtcccagctactcggtaggctgaggcaggagaatctgcttgattccaggaggcagagcttgaacctaggaggtggaggttgcagtgagccaaaattgcgccactgcactccagcctgggtgacagagtgagactatgtctcaaaaaaaaaaaaaaaaagaaaaaaaaagaaatctccagtgctgccctgtgcccggcaccgaagccgagggaaggcagcattagtatgagctcccagcccaccgggctcctgtctggagctgacgtgcgaccaaggcacacgagggaagcatggcgaggtggacggtgcggaggcataaggagcaaaataaggcagatgcagtggctcagtggctcctggtggctgcgaggagcgtgggcaggacagccccaggagggcacctggagagcagggccggctggggcaaggtgtgtcaggcacttgtcaggagcaaaatgtaaggggacaccaaagagctcaggaatcaacacagatagtatttaatgcagtatttttcaatatcgaaatgatgcatagtaatctctatgatgaacaaatgttggaattttaaattaagacaggcccagccctgcacgtgcacagccctgtcagagtttgttcagcgtggaatttgatttgtttaaaatgttgcttcaaaatattgtttgattcctggattttttggcactgccttaacttttgcacctggacgaaggcctcaccctaatcccagctggagagggtcaagggctggtgaatttggctttggacctgcagagcttgtggtacctgagaggtggggccaggaacaggaaggagctggtgagaacggcacccggtatgggatggggccagatcagagcagcactgtggctctttccaacccgtggttttgctgctggatgcttggcgttggtgctgagcccccggccctctgaacggagtgtgatgaataacggggccggggagctcttgggcccctccctgaagcagcagtgaagccagggacatgccggcagcaggcagggagagggacgtctggtctgtgcctggagccagctgccccatggaggagctgggtgaggatgcggtgggaggaagaccttcccagtcctgcatcctccgaagcataactgagtgcttgtgtggcttgggggtcactctggtccgaggacagtcttgctttgcttagccaggctttgaagagccaccgggatacggacagcagccctgctgggtggcaggttgtccaccctcgcccactcaacgctggaactggatgcagagcacctggatggccagtcccagagtgtctctgacactcccagtcacctcatcccttagaccaggataagatgcgggatcccaacctcgagcctcccatgggctccattccatgtgctcccataagccactgggcccacctcctggctccagggctgtctggccatttggcatcttggtttcctcatctgtacaatgaaaataatagtcccagccttctcgaggagttacaagatgcctttcgtgtgaaaaactgggatttggtaccagactatctggatttgaattttggccctacccctcctaacctgtggctttgggccaatctggcctccctgtcctcagtttccccatttatagagccatctcattgagttgctgggaggatgaacataaggaagtgtactcatgtgcccagagcattgtgattttacttattattaccaaacgaggcacacaataagtgcctaatagatgctcagtgtcatttcacggattctgtgtgccttgtgtgtctccagcagccaagctctggaggtggggaagctgttgacgagttgcacgaggtaattagaaagaggaggccacaggtgcaagggtttgggtgacacctgtggacagagagaggccgatggaccctggcagaggggaagggggcccttgcacatagaaaatgtttcctgcatccaagatccttgtgactctggaacagaggcagcagaggtctgcaaattccaaatcataaacccagaaagcatagaacattcgtagagaggaccagaaacatcatatatcttagtgtgtatagaattttccacatagccaaacaaaagcacgtttctaactgaagctgttggagagttcctgaggactttataccagacaagggccggtaagtggaagttcaatacgcaggagccattccttttgttcacaaatgtttgccgtcttttctgtctatatccgcattcatgtgagggcactcataggtccaccgtccagccccatgctttgtttgctaccaaaaaatttcttaagaattcctcagctgcaaatcctcctaccggagggggggttccaggaacccagccttgctcggggttggggcacctcagcacctgctgcacaggcgttggtcattaaaggtcatgtgccgtatccgtgggccctcggggtctggtggcacctgggcacacagtccagtggcggcctcctacctgccagacactgggagtggggggctcctcattcctgttccctggcggtggggggagtgccccgagctgtcacacatcagaacccaccgactcacacgttgcggcaccttacagccccttgacagcctctcagcctgagagaccatcaaactgagttcctggagagggtggctgttgaggcctggacacaggtgtggacaggatagccctgcctcatctcggagtcccgctccggttcagcctcttgtgggtctgaagctcaggctgggccagtccctgcccctcagatggccggaaaggcagcccagccccacggcctccttgtcaggctctgagagccgcctggcctccagctctgctctttttttttcttaagatggagttttactctgttgcccaggctggagtgcagtggtgccatcttggctcactgcaatctccacctcctgggttcaagcaattctcctgcctcagcctcctgagtagctgggactacaggcgcgtgtcaccatggcaggctagtttttgtatttttagcagggaccggttttcaccatgttggccaggctggtcttgaactcctgacctcaagtgatctgcccacctcggcttcccaaagtgctgggattacaggtgtgagccgccacgcccagcctccagctctgccttgattttctcttaaggccgtgaggatgtccacgcctcctcctttcctcacggcccattgatgtctccagatgctctgcaaagccaccctcccctcgggagctccccagctggtgacgggggaccttttggggatcactgcccaggtagtcatgtaggtctgtgggccgtgcttccaggctggaccgagacccggtgcatggggtgcttctggtctgagctgaggcccctggaagccacagccaggaggcagcaagggacggctgtcatgtcccctctcccctgtctcccagggtccctgcgggacagatttccctgcctgagcctcctggttgcccataccctggcctcccaaagcccagcctgaagccttaggcaccctacaacctgcttcctctagcagcctgccctgtctcttctctgccgatgttcctgaaactttcctgcctctccttacctcttggccagagagagactggagaccctgtgggaacccccgaggggagggagaaggccgctgtttgaacggaggtggtctttccctctgcccctccccaggcgggtcacacttgcaggcccagcctcctgctgtggcagcgcttggggtgtcggctgcctcctgggcacgagttgggagctgagggaggcgctttcaggaccggagtggcaacccagctggaggaggagtaacaggcccgtggtcagcagcagccgccgcagggaccccggcgctgtacctgtgccccagctgacccctcccgcttccctagggtgggccggggatggtggtctgttgcccagcccaggaagaagaggggccgtaatcagcagcagccacctcaggggaccccagcgctgtacctgcgacccagctgacccctcccccttccccagggctggctgggaatggtggtctgttgcccagcctaggaggaagaggggctgtggcttccactctagaggtctctctcccggtccctcccccggtgctggtctaactgcaggcctgccttaggccgtgccggcacctgctgactgacgcttagcggatgctgataggagagggctgggatggggaagcagcaagtcccggtcactgtgggctcgggttacagatggttgaggcacctcctggccatccccaggaagcaaggccccacgcagcctccgactcacccactgcccgtgtgtatttcaggaggctgcatcccccaaggcccccaccaggtaacttcattgggctgggtgtcgctgcaaaaccacccattgggtgcggtggtcttctggtggggggcatggctggggaggatgcggtggaggagaagccagctccgtggttggggggagggcggactatccgtttcctgtctgtcccctgaactggagctcatggtccctcccccaggtgcctgggccatggaagaggtcacagccctgccttattcctgtggcagcctaggggagccctggccagtcccgtgtctcctgggagggcgacagcctggtcaggctgcagggcaggactggaatgcagacccctgcttggccatgctgttgcctggctgctctgtctggggaccttctgttcaggaagagagaagcgggccggacagcccggctcagtgattggaagctcagctccccatgttcagtccagcaggaagtttgcctcctcggaacacttgcgtgcttctgcatgtgtcttcttggctggtggttctgcgaggcccctactgggctgcgtcatgtcctctggccaccctggccttggtgcctggcccctgtgaaacagagatacctgggcagtcccccacttgtgcttgcaagcctgtgtggcttcagtgatggctgattctgctccacccagaggacctgggaatcctcagcccaactgtccagaggagtctttctcagtggggagagcctgagctgtcctcctggtggacagtcctttagatctcaggcggacttccctgccggccgttcctcctgctgcccctgctcctctgtcccccatctgtctcccaccctctcccctgcagcagccagctggcacggggacctccccttccctctgggattgtgaatgagacgactttcctggtccttctgggtctagatctttctggcaacagtcagtgaaacccttgtctcaggtgggaggagaaggctcagtatgtggtcacaacaacggtcctaaccacatcactctcaaacgctggctttcacttaccccttgccctgcccaacagttactttcatcatcccattttccagattaggaaatcaaggcgcagagagcttcagccacttgcctgaggcccccacagttaagtgtctggatttgaaccctggagcagcctggctgctgagctgtcctggagacggggtactgtgcagtggtcggggtaggggtggagctctgccgtcgctgactcccgggctacctggagtgataacacagcccagtgtctgggcccctgcctgagactttggctggatgccaggagcccgagaccttccagctctttcctgtgtaaggcgccatggggtgaaatgaaagaaaaccccagttagaaggtgtccccctcttccttcagtccctcagctgccctggattttgaaataagacaccgcccgtctgtggggtgagcaggaacagattggaaccgcatttctctccccccagtcacagctgccaggagctcatctttctctgtctcctccccctgccgcctctccccacaagactgggctggatgctgctgggaaagtcaacaggaagtcttttggctgcggtggaggtgggggtctgtgcttccctggggaccgagatgagggctccaggttggctccggcaagagcagggaggctcacgtctctgcctgctggttttgcttcctgtcctgggagaaggtatccacatgtcccagaatgcaccctctgcgtgtacagggatggcttttgggccattcacctgaggtttattgatctttctctttggaactggagtggctcctccacggtggattgggctgagctctctgcctcggccgacgtctttccccaggcacttcctctcaccgtgccagggtgcaggttgctagtggatgggtcttcaccctcggggattggcagctgccacgctcatttcacagtcgagacaccctggccgaaggttctgctaagctccatggagtgtagggattttttttgagacggtctctctctgtcgcccaggctggagttcaatggcccaatgtcccgctcactgtgatctcgacctcctaggctcagcagtcctcccatctcagcctaccaagtagctgggactacaggtgtgtgccaccatgcctggttaattttttaattttaatttttttttgtagaaatggagtcttactatatttcccaggctgaactccaactcctgggcttaaatgatcctcctgccttggcctgccaaagtgctgggattccaggcatgagccattgtgctcagctggggttttcctttaacccttcctggcccttcccaggtgcaggacccgggcctcagccttatgtgttcttgaacagctctgggctctgtcctgtacctcctgggcgcgtggtcaggcctctcgtgacatcagcaggagactcaggtgaagaagcaggcagaacggaatgcttgctcacccagcctcggggccaggcggggcggccaggacagtagcagtggctggtgtggcttcctgggaggtcagcccattggcgtggccagcgaatggggaggggagcttctccccttgtctcccctcatttctggtctctgggcctccagggccaggtctccagagttctaggtggaggatggaggtcagggaagctggggtaagagcgggctgggggtgggtggtcaggcggatcctggaaaaccatcctctgcaggtcccgctttccccagggagcactcagggctggtcccggggagccgggctaatggtcacctcggatggtgcaggggtccatccccatgaaaccgggcccatccccatgaaactgggcccacagaagcttttggttccggttctgttctgccccctggctcttgcttccaaagtaggactcaggatagctctgaattccctgccgaaatgcagcttcctgggccctaacccagccctccagaaccagagtctctggggtgggccctctgcttgtctagcagcctccaggggacacttgtgcctgccagagcaagtctaataagcactgctgtaaacccctcgtccccacagccttctggttcgtctcccttttcctgctgggatctgcatcaggattaaatgccaacatcagggatcaggttatacttgtgaaccctgagacaatacctgcatctttttttttcttgaggctgtcttgctcgctctgtcatccaggctgaagtacaatggtgtgatatccactcatggcaacctccacctccagggttcaagcaattctcctgtctcagcctcctgagtagctgggactacaggctcacaccaccacacctggctaatttttgtatttttagtagagatggagtttcaccatgttggccaggctggtctcgaactcctggcctcaagcgatccgcccgcctcagcctcccaaagtgctgggactacaggcgtgagccactgcgcccggcctgatacctatatcttgaccaagctgctgtggaaacattgagttccccttgatagttttgtccacagagtgaatgtttaggaaccggcgaggcatctctcacccccacccagatggcggcctggaggcagcgtttctgaccctgtgatgggatttgtctctcttgtccaagagactttagagatgtggcccctgaatgtgggggcccctgttggggtgggaacgggagctggccctggccattgtccagtgaccccatctcagtgcctcgatcctagcaccctcgatctcagcgcctccccttccccggctccgcgcggagatcacgtggcttgcgctgagcaatcctccactgcccccgtcgcgttcctgctgcagggaagcctttccagggagccagctgacacatttggcctccattatttgtttttgaacaggaatgaaaggagagagtgagtaagaaagtggcaggaggtgggggttgcagagtaggggaaggtcagagagaggggaggaaagatctggaaagtccaggcatgtgctctggaagcaggtgccagcgatgagctcatctggagggtggccgcccgccctgagccctgcctggggccagcagggaacactctgccagggcatgtcgctgggagcctgtccttggctcactttctgctgctttgagcgctgagcagatttgtttccattttagggacaacgcaaggaggctgtcattccacccctcaccttattaatatttcatgaatcataagtgaccacttactgcgtcctgacgtactccaggcgctgggctcgaagctttatgcgcttcatgggatgtatctgcactatcgccgtagaaaacggttcctgttactactgcagagaaggcaccgaggcacagagaggttgaggaactggcctcaggccacacagctagaagcggctgaccctggctgtgaacacagggctgcttgactccaaagcctgagctggtttgcagcgaggctcatggtttctgtgccactgtttgagcctctggtcgagccccttggctcagtggggggcccagtgacctaccagctgttccattatatgttgtggacacctccacggcccacctgggtgggagggaaggggcttcaggaggtgggaggggtacagggaacacagtccagcctgcttgggcccaataccttgaccttcaaggtaccccttgagggtagcatgaggctaagctcttgttctcctccaggactctgttcctgtgagggcctcggggtcccttgcttttttctgggggccttgctggtcaggatcacagagaagctctttgctgttgatctttctgcctctgtatcttttggcaagccattttatgactcagttgctttgtctgtaaaatgggttgaataacattgtcctgcctcggagggtttttgggaggatcaaatgagacctgttgcacagaagccctttgtaagccatgctgactggcggtcgccgggcccccaagtgaatgggcatccgggcactgagtgtgtggactcagtactcggaaggaggggctggggggtacctagaactcctgggaggcttggacccctgctctgctcagattctgagcttctccttggccagtttaattcccatcagtagggtgagggtaaccaggacttacgcatagttgggcgaagtcgagtgaccacatgtggaagtctagcgtccttcatgcaaagtgggcaggcggccaaagtgagctctgctccagtccccccacccccggggctgttcctggcgccctgccctcccccagagccccactgacctgcaccatgtgacccgggcctgggaagatgggcccagctgtgggaggtcgtgcgggctggggactgagagtgccggaggagggcctcccaggaaaacccagctgcacaggaagccgggccagcggcctccggaagcctctgggctttgcaagctggactccccagatctgtggctgtggggccctctcctgcctgcagctgagagcccttgacccgcacctgagggcttcagaggtccgggagggggatgtgaccgtgtccccagggtgaagcccacccgagtgtcactctggatacagccctcacctcttcctggccccctctctggtcatggggacgctgcctggggggggttcccttacatggaaggagctgcagctgagctggcgggcctcgcacacccccaaggccgcctgacttccagcctccaagtggggttgcattcaccactcaggacctggagcctcagccagagagggaccctccactgcctctttctctgtctcttgggaaaggtagggtctttgtgccccctcccacccagggacctggcatgttgggaggctaagaggaagctgccccccgctcatctaccccccaaccctcccagccagcagagttttacctgtgtgcttagaatctgtgcgtggagccagaagtcacaaggttggcccagctgtgtctgaccctggttgtgcggtcttggacagtcccagccctcctggagctgagcatcctgatctgtagaggagaggctgctgtgccggccccgcagggccctgtgcagaggggagtgtgtgcggctgtgagttcaggccatgccctcagactggaggataggatcggaacagtgggtcaggatggccagagggtcccagcctcaggaggaggcctccacacctcccagcacctccacaccaggaaatgcagccaggcccccaggcctcccatgtcaggaagcagcaccccgccccccacctctggttgcctgggcctgagaagttgagcactcctcccgaatccgagtgccctctgacccctgcttgggtagttgtccctcctgaactgaccgcctgtcctacacagtcccctgtggtttgcccgacagggtggccagcgagtcccctgcacagcacacctcccccaggagtgctgcctgtgatgatggtgtaaagggtgcccccccgagcccccggaggcatgcagtggcgcaacagcgtgagcccaggagccccggtgagctcctggatggagaatctgttcagatcactccccagcctaaaccttccctgggtgtctgctgtgcttggggcgctgactcatcgtggggcggcctgtgagaccctacgtcacctggccactcccctcagcccctgttcactgcaccggtcccctggcctggctgctcctggaacatgagggctcatcctcacggaagaatattcacttgttccctcctggaaagtccctccctagacctcctggccgcctcattcaggtcttgctgaagcgctgccatcttggagaggcctccctgtcacccgcagttaaaacagccctcccatgcctgtgggtggctttctatggggcatggatgagtattggagagtcttgccgtttatttgttcatatgccctctgggagggcaggggacactgacttgtgttgtgggtgccttgcatgtcacgggtgctcagtgaatgcctgttaagcattaggggagcacaaaggagggaagcctctgtccaactggagcagtcagggaagacttcctggaggaagtggtatctggtctgcttagaatgtggcgatttgtctgtatgcagacattagattagagggcaaaggccattatcataacttagcagacagctacaagcagctaaggaattgctatgacatggactgctcgtgattggagctaagaaggagtcagagacagaggtccctgtgctctggcgtgagtccttgggggaggctgagctcccagaatgtggggccgcctgtgcagaggccggaggtgggagacacacctgtgagtgccggtgagtgtggggtgagccactggggctggatcagaagatgggaatccctaaacccaccaaccagccttggtgccctgggagtgacaggagacggggcttctgggggactaacccagcacaagtggacgagatgggatgcaggggaaaggacaaagctctctgaggctttgggaagctgagttagggtagagccatgacagggtgagttccagaagcaacacaagaaaaaatagctagactgggttttcccttcactgtgggagatgccccacctcacttcccccgtcctccgggctctggcaatgggctgggcacagtgaatgggttccatctgcaggagtggtcacaccccttgggcacagctgcctcatacactgtattgagatgggatccgaggccgggaagaacagcttcttctgtaggttgacattgtcagccttcggggagggaaggacggcagggggcctggagcatctccttttgccatccacactctgtgcctgcctgcagggtcttgagccctgtctgttctgcctcagtcctggtcaggaacttgttggagcccataggggcagtcaggctggaacaggaggagaccaggccggcaggggagccgagagggggccctggacagcacccagggctgagtcatcctgggcctgcccgacttgctatttggagctgttcccgcttgctcatcatgtgcaaggtcctgatccactcgggtctgtttaaccagcgcccctccccaggcccagttagcctggttttcgttcgattcatttattgtcatcagtgccatccttgcaccacgtaactagcctttgcagcatgccagccaccaagctcagggccctctgtgcatctcctgtaaccctcacagcaacccgggaggcacagagaggctgagtcgctggcccatagtcacacagcaggtatggggcattgccaggatttagccggatctctgactccagggcctttccagggccttgggtgggacactggcaaggaagcaaggtatgaacactggccctgccttggacagagctcggggacggtggcctggcaggcccagctgacacagtgaccctggtgcaggttcaaccattggcaaagtgttcaagtacacacagaatctcaactggggagacaggcgaagcggtcaagggagggctgtgagtgacaggtggacactgtacctactggcagatcagctgaccttggtgccttctggagcctttcaacttccttatccagaaaaagaggaactaacagttccacccccaaactgggtgggagtaccacattcgaaattgaagcaaagctggtcgtgtcacaggctcggcagatgttagctgtgcaggcaacttagtgaccatttgaagtaggctgtgcggcggcatcctcatcttgcagatgtagtccagagaggttagggcactaaccctgggtcacacagcgacagctcaggctacagagagcagtgctggatgggagggtgttggcagcttcaggcacaggctgggagggctgtggggtcagcagagggagggcacacttcccagctggtggggttcccttgtgcctcagtactcatgtgggcccaaaggagctggaaggagggaggttagagccacccatgggttcagaagctgataagcaggttattgactctgaatttgcctcatcgtatgtaaattggggacaaatttggggatttaatgatataatgtaagaagcagacatgtcacagccctggttatacagtcagtgtataataagtggtaagccgtcagaggaggcagccggtgagaatgggagcatctcagcagccctccgccccctgctcctggttgcagatgtacctgttcttggctatttgtgccccagctccgtgtcctccggtgtgtgtgaggccaagctcctggggtggggacttgggggtgtgtctgcagctcctgaggccaagaccaaggctgaggccgaggctgaggctgaggccaccttggtgaggaggaaattgcaggtggagaagctcgttgaccgtgaccttgatctgaccgtaattttgatggtgccgatgccgtcagcacgcaggcctcctgccctcgccacgactggctcctgcagcccacctggctgagaggtgtgctggctctcgcaggttgcaaaatggggacatcaccgtccgcctgggctacagcgtgctcgccgattgcatttggggagggactgagggctgattgtgttgtggggatgttggcagagaatcagagagggcatccaaaaaggccaacagttcggtggggagaggaggcgcaaggctggttcctgttttctgggctttgatcgaaagggaacaggggacacatctggggacagtctccttcctggaggaagaagggcttagggtgctggtgtggagtttgcacagatggggataatgagctggagggtgctgggcaggagctggccagtaataggctgacgagggaggccctgctggctgggcctggttttcaagtgagcatcctgagctgcggggacccagggggtcttagagacctcagagctgagactcgggaccacagaggggtgggctgtgctcagggcaacacagcggatggggcagatgttgcgaaacctgtctctctgcctctctttctcctgctacagaactggatcctcccagctcatggctgtcaaatcctttagatgcttctgggttccatgggcgccttacactggcttccctgtaggacagcagaccctgggggttggctctgatggtattcaccatggggtaccccatgcaagcacagtgctttcacgcccagcctcccagcctgtggagtaggcctgtgtctggccagcctcactttgtggccagaggagggagacagtggttctggagacaggagctggcctggggctgccctcccagcccctgttctcccagctcatctccttgccttgcgggtgctggccaccctccccccgccagctccatccccagctttctctgcccgagccgtgacctgtcagtagggggcagtggaggccttgaaagtccttggagaggactttgaagcagtttttacaaatctgtccctggaaagtctctcctgtcacacccccagcggctccctccctcctaacatttttcctggggttgtcatgcagcggggggtggaggaacccactaggccgtggatagagcagagccatgttgacacaaaccctggctgaacccacatgctccctacagccagcggccgatcactggaaccagggaagtgacctcatagcaagggcccgcagagcagccatcacgcattcccgatcttggtttctggacccagctctggaaaagaagccagatcctagccacttggagctgcctagggaagaccccagcctggtgccggctgacagctcactggaacttttcatctgcttggccaggtgatgccaaggggcagaggttagaagtgctaagaagcaggccgagggtggtggctcacgcatgtaatcccaacactttgggaggccaaggcgggtgaatcccttaaggtcaggagttcaagaccaggctggtcaacatggcgaaaccccatctctactgaaaatacaaaaattagccaggtatggtggtgcacgcttgtaatcccagctactctggaggctgaggcaggagaatctcttgaacccgggaggcagaggttgcagtgagccgagactgtgctactgcactccagcctgggcaacagagcaatactccgtatcaaaaaaaaaaaaaagaagaagaacaagaagtgctaagaagcatctgtcttcctgattgaaaagcaatctttgctgggcgtggtggctcacgcctgtaatcccagctttgggaggctgcggtgggagagtcgcttgaggccaggcgttcgagaccagtctgggcaacagaggtgctaggggtagtggcgcttgcctgtagtcccagctcctcaggaggctcaggtaggaggattgcttgagttaggagtttgaggctgcagtgagctatgaccacaccactgtactccagctcctgggtgacaggatgagaccctgtctcaaaaaacaaaacacaaacaaaaaaccaacgtttatcttttgtgattttaaaaatcacacctacttgtgacaaaataattaaattagaaaatgtaaaggaaatgatcaataataattgcgtcctccagacaaacactgttaacatgttcacgtttccttctagtctttttctacatagacactcaatacttattaatttgttttgaactaaagatggttttctctgctttgtatgagaaccacctcagccaggcacggtggttcacgtctataatcccagaaagctgaggcaggcagattgcttgagcccacgagtttgagaccagcctgggcaacatggcgaaactccatctctacaaaaaaacacaaaaattagcctggtgtggtggcacatgcctgtgctcccagctcctcaggaggctgaggcaggagaatagcttgagcccgggaggtagaggttgcagtgagccaagatcgtgccactgcattccagcctaggcaacgggagtgaaatgctgtctcaaaaaaaaaaaaaaaaaaaaaaaagttgccacgttgtcacctctctcagggattttcatcctttctacttttcgcccaagacttgccctgtaaaaggatgaggccaaatagccatgggagggtggtactggatgttcaaaaaaatgtttcgtggctggcgggacttagaaacaggttggggaggtttcagcagagggtggaccccagctgggggtggggggcagcaggggggcccctcacatgctctctctgcgtgtttcatggggctgcctgtgaggccgtgtgaaccagagcccggctgggaagccacatgctacctggactctgacctttcctggcagcatgaccttagccaatacgctcaactatgttcccctctgtaaaatgggctaatagaaatgtccactcgagacatgatgagaaacaaaggtgttcatagagcaaagtgcttagaacggtcctggcatgacaggagcccacatgtcagtgctgccgttggcatcgtcatcatcacggcggcattggctgctttgtttctcccttgtccctgtcaccttcttccctcagcaggctctcattcacttgttcatttattcatggccgaggccccgtctgtgtcaggcctggtgctgagaacgggggtagagagatgggggctgtgccctgctccctgacccaagggttccctttgcaatgtgaagttcttggagactggaccctcaggctgttccaccagcccctcctcaggccagcttaacccttccgtgctcgttttctgagctgttagaggaagagagcgggaggaaggatggagtggggtttttgtggggactgagcggggggtgtgtgaggccctggaaatggtgcctgcggcactcacgcagcattagcttttgctgcagttgctgtttggagaatattcttggatttcaggacactgatgacagaaggtggaacgctttttctggaagccatcaagaggggaccaccgcggcggctgagcagagttgctgacttgtgagctgtggcctgaccacagtcactgttctcatgagcgaggccccctgtggtccccctcccaggaatttctggccccttggcaggggacagttcagggctgggggtgggtagtggtgtctgcaggccctcttggagtcagagaatcccctgtcgccgtggcggggctgttccctcctgcccctcccctcccgctgtgctctcagctgctccgacaggatgcttttggcctgagagacagaaaccccaactctgaatggcttcagccctcaagagaatttggagcttttttgtgcaaaatgagatgttctgagcatcgaggatgctgtgggggatcctccatcccaccatctccagccgtggtgtccctctcggtcacaggatgctgcagccacgttgcagggaaggagagcctcccttcctgtgagcctagggagcccctccatgcagccccttcactggccattgcctgagacccgacctggtggctcctgccccaaggagcagaaagggggttcgctaggtcagggtggggctgggtgcgaggaccccccccggccaacagggtctgcttaggtgtccgtcctgttggggcagcagggaagggacccacatgtggcactgggacacggagaggcttttgtgcctgtgacggccaaaagggatggcgccccagccacgttcccacccaccccgaggcccagcatggccatgccggaaatagcagcatcgtccccctcactgtcctggcttgctttcaataggccagaggggtggggctggagcgggcgtctgacctgtggctggatctagctgcccgtggacaggctgtgagtgaatctgcagaggaagggagatgggaatgccgggaccttctcctgcacctcccgaacccccgttccctgtgagttagatggggagtgcacccctgccctcccctcctgggtatcccctgcgccccccgccccaggcacttgatgttgcctgttcattttccctctctgcccctcccgctggcccttcccatatggtcctaattaggaccttccgcccgttggtggatgggcagagaggggagcttgctgtggggcctcccccgatcgggggacttcccagcacagagctttctggcctctgcagggacgctgtgtgtgcctgtgtgagtctggcgtgttagaagcgctaagctgcagctgttctgtgcgtttttcacatttctcacttctcaaaggccctgggtttggtgtctgtgggctggggatctgtgttggggtctccaggaggcccttggtgggagaggcagggccccttcccctttaatctgggcaaccttgctttggcctgctgtctgcggaaagtgccctaggatacggtggcaggactggctggggttctggctccaggcccagccccagcccctgtcagacttaccctccttgtgcctccgttcaccctgtccacccgcagggcctgcaggagcatcctgagagttggtagggtggcctgcccggcgtccgcacagggtctgctggtgggtggctgaggctgcggtgaggtctccatggctccctcgtcctgcacatccttcccttgttgtgttgtctcgctagcatatgagcccgtactgcctctgagtctgcagcctgttttccttaccaggtggctaagcagggtggcagccagggtggcagagtcccattggcctgcaggggaccctctgtgggctgcaggtagtcccctgtggttgaaggtgccctggcaggacctgcaccatgacccccgtcaaagctcacgtccaaggcatttgtgggcacccccgccccagacgtgagggttggcatcttctcttgcacgtgaagcaaaggcctgtttgaaggagcgtgtggaagcctgggtgtgatgaaggcaaggaccggtggctcacccctcttgcacctggaccttgggtggcaggcctggggccttcagtccttaattcaggagggtagccagtcgctggaactaagagtgaacttcagctgttgttgccatagctggagggaagaggggaaaggaggcgctgcaggggagcagagacctcacccttcctctgccgacatcaggctgccggtgctggacggggccctggcaaccgtggcaggagtggtgatgtccgatgatggtaacaagggcttcctgaggaccccgagctgtcttaagggctctttacctggagtaagtatcccctttaatcctcccaacaacactgtgaaattgattctgttgttattcccatttcaccgatgaggaacccacagcccagagatgttaagtaacctgcccaagcctccctctgagcatggcagagggagggtccgaatgcggaaagtctggcttcagtgcccccatccctaaccactgtcatttacctcttcggccagccctctgattgcaaaacctgaggcccagaggagtgcagtgacttggccagcttcgcacggcaggttagtggcagagctgagcagtgtctcccatgccctgattctgtggcttcttgaggtggctcacccctaaacacgccccccatggtggctctgtttcctcctctcctctgaacctgccagcctgtgctcaggcagggggagaagtagagcaaccatgccgggcgggtcgtcgtgccccagtgccgcctgccctacacctgattggcagcagagtggcccctccttggtgtggtctggaggtgccagtggtcactcatcagcacagcccagtctcacacatgtcactcccaaaggatgttgacacagaatgaagcagctaggggaggcggacgctttggcacgagggtggcgtttctggtaatccgtagtgctgttgtctgtggctgcctttggctggcatctcacctcctcctggctgtcctgcagccacctgagggaggtcagcatgtcgccttcatcccaggacagtgtgaatgcagcagcgcaagcttgccagcgccgcactgcgggatctggaggcctttgctcctgagccctgcctctgtgtaatccctaaagcacggacttcttaggggcttccattcctccacctggaaaaaccttacaccgtttagggcttgaggcagggctagagcatggagacgttgctggaggaccaagggagaactgagcgcgtgttctcttggcctcagcctcgtgtgtgtgtttatgcatgggtactttgccatccacactggcttccacggctgggtgggagttgagttgagctcggcggctgcctttccaccctgcgggcctggttggggagtgtgaggatgcctgctggaagccaacgtgcacgaaagagttaatggtggatcccatttcctcagccccctctccagctttcccagggaaagggcaggaacagagaggccttatcttcagaggaaggggtgggcggggacacagcgctgttcggcacagtcccctctgagccaccctgcatgtttcattccaccgacttctgcagcccagctgttcagagcggatccagaaggtggagagagggtttccaataagcagaggatggagtgaatgtgagattcattactgggatttggcaaagcaaagagcctcactttctccccgcagatgggacgggggcggggctggagccagcggggtgggggtatccagcaagagctccttcccatcctcccacttcctttgccatgggccccctcctccacgcagaccctcagcctggaatgatcagtgtccagcttttctcgcccctctcctgccccgctggagggagtgacctggcccctggccccggccacctacacctcctgttttgctgcactagcctcgtggtaggggctgcggcggaggtgggcaaaagccgcttccgggcagccagcccccatcctgggagtgactgaaagtccttgggggttcctgcagggtgagctgcccattctggccctggtaaggacacccaggagagggccagggtgcctgtatttggggcacagcataaagaacagccgtaagtgtttctcaggcaggagggtgccgaagcattgggaagctgggatttagaagcattgtttggggtggtgagtggaagatgcaggacacagattcacgcgattgtgcagatcacctggcctcactccctcggtttacagtggaggaaactagaggccgagagaggtgaagtgagttccctggggtcacacagcctagccaggcccagggcgccgacctcctgctctgccttcccgtgcccattcggttggcatcagcatccctgccttgacacccccgtgtggcagctgctgtgattctgtgactcctcctcaccccaccccagtggggccctgcgagggaaagaagaatgccctatgcagaagtggttggaaagcaagaagcctggagagaagtgaggcctctgtggtttggcctgagtccaggactcatggcctggttcccagggatggagcaccgacccctcccttctacacccccaccccacgcccccaggagctccctatggggaagccggaatggacctgggctcagagattgtaaattcatcttgctggatgtgtggctgcctttatgtaaccaactctctcacggagaagccaggggatggctctcagtactctcgggggtctctcagtgaggtgggaggacctcgagaggtcaggaggctgctcaagaccttctgcccctcagggaccaggtgagggcttgtcgactgctctgacctcctgatgcttctggtggggagacctcagaggggcctgccgtcaccatcgccagtggccctggcctgcccagtcatccttctggggtggccaaactccatgctgcaaaagcccaagtgaaccccagtagtggcctgggagaatcatctgtcacgagccaaggatggagtttctggggaggactttctgctgccccccaacccctttcgggtacattctcctgtagccccactccctgtaagaaagtcaggtgcctcccgaagcttctccctggccccaggccagaggtgacagtgggggccccttgcttgcgctggtgactgtggctggttgttggtgcctggccctgccctgcactgtgcacccattgaaggcggcatcatccgggcctctccggtggccatgcatgggtgagcagcccacgacacatctgcttccagcatcgtgtgggccggggctttcagaggggctgagggcttggatggccctgcaggggggtgctcctggccttgtgaccgaaaggagctgaaggtttggagaagccgttgggccgaggtcagttcttatagatttggcgaggagggaacagatgctcacggagctgctccaggcactgcacacactgcctcactctgcgctgacagccaagaggctggttccccgccgacccccattttacagataatgtgctcccccagttccttagtggtggagccaggattcgaacccacgcaggcagcctcctgggcctgtagtcctacccttcatctccctccaggacctatgtcttggggttggcaggataatgactcccagagttgagcacatcctaatccccagcacctgggactacgttaggtgacatggcagggccagctaaggtcactaatcagctggtcttaaaatagggagatgatcctggatgatccacacgggcccgctgtcatcacaagagtttttaaaagcgcaatagaccatctgaggggtgcagtgggagaggcttggaaggaggaaggaggccacaagccaagaaatgcaggtgaacagaaaatgcaggaaaacgcagtctcccctgcagcctcgggagggtgcgcagccctgtggacaccttccctgtagcctagtgaggtggagtgtgggactaatctgtgttgtttgacatcacaagtgtgtggtcatttgctacagcagtgatgggaattgaatgccattaggcagcagtgcttctatcccggaagaattaggataaattcccctgtggatctcaagctctgggagattctgggctcctctggactgctccagttctgcaatcataggaaaggtctcccatgtctgtttgggagaagaaaaccccgtagcaaatccatttccccttttgacaaatgaaggcgagggtgtgggctggacacatgtttcctttttgtggattttttttgttttaacacttagaattctgtagctgaaggagactttggggggttgtctgcctgatttgcaagtgaagaaatggaggcccagggaagttaagtgactggcccagggtcatgcagagtcatgctggaatatcaagctagatagcccagttcctgctccaaagtgctttcctccctggttggggaggagggttggagggagtggaccccgagcaacagcagcattggcaggggttggaagagtagctactgtatccaggtgctggagcctctggccacttcctgcaggaaccaggtgacccaccatggcacaggcctctccctgtctatctgcagccctgggggccccagggaccagaggacactctggcctgagggctggggcctgagagaagagatggaagtacccctagtctggcctgcccccgtggcgtcctgcaggcatatccggcagcccaggggtcctagagaacttggctggtgggcgtccccaccttgccgcagctgcaccctgtggccagcagcttgcaggacttgggctgttgcctgtggccctgaaacagtcattttctgagctgagtggggatcaggtgagcagatccccacaccttaactgctgtgatctttctgtcctggaggctggtgggcagcctggttggtgcttcatggcactttatgaccggccctgtcaccaggctcgtgagttgctcccctcctttcgggcatcctgaacggcttccctgagagccccgccctgggccttcgcctctgcaggcccccgctgcctggggcgcctccttcccctggaagctgggcctctttggggactcattaagaagggccttgccgagtgctgccaaattgccccatctggtccccatttgttccacttaccaccctattttaacttttatgtctcctccttggctctaagatctgagcaggcagggcctgtgaggcaccccaggtcccctgatgctgccagcacccaggggactgttagtacatatgcagggagggaaggaatgaaggaagagatgacttggggagtcctccagttcccatttgtaactggcacattgcgacaaaacactcatggcattttacctttttcatataccttttttttaaatttatttttatttgagatggagtctcgctccgtcacctaggctggagtgcagtagcacaatcttggctcactgcaacctccacctctcgggttcaagcgagtctcctgcctcagcctcctaagtagctgggattataggcgcccaccaccacgcccggcgaatttttgtatttttagtagagatggggtttcaccaagttggccaggctggtctcgaactcccgacttcaggtgatccgcctgccttcgcctcccaaagtgttgggattacaggcgtgagccactgcacctggctttcgtatatctataaaagagaatttgcccagaaaatctttcagatgcacctttagggttttaaggcacagatacatgaagcttgtcagtgagcagctgctgcttattcctttttctcttccaattcagagcggcctgcgtcccaagcggacagctgctcccttcctcttggctccctgctgcccacgctcccacagaagcagggagaagaggcaggaaggtgacgcgtgatcatccgctgggcgcccgcacagtgccgtctgcacaggtgccatctcctttacttgtcactctcctcgctgagccctttcccctttttgcagatgagagagcattgcctcccagaggttaagaaatgggcccagagtcactcagctgatcagcgtgcagccagatttgaaccacatcctgctgatctccatgcctgcaggcctggcctgatgagatggacagctgggtggtggagaccttgagaccctggatggctcccaaatagggcctgtagctcctggacagggagagtctggcacaaagggtttgtggagtgagctgggggagaaggtggcttagggtccctgtctctgaacaaacagatggaggggctattccagcgttttctcagcctctggtgtgctgggctcctggttctgggaggagagaatggagctggcctccattctgggctgggctggtttgggcccaattcagacaagcttcttagtttgccatgagtgacacttttgcctgccctggtgtctctgccaaaaatatgaagggtttcagaacccccaccccggcctgcttccctcccagacttggagtgggtctggggctgacaacagtctcatgccagatagcctgagcagccaccagtgccatcaggtctgacactgcggcccctgccccggagggaaaaacaaggccctctctgggggattttctgccagcttgtgaaaacaggcctggagtcagccagcgcccccatgcttagacacttcgtgtggttttcaaagtgcttttatgttgctagctcatatgatcttccccaaaaccccataagggagggcaggaagtttgagcaacagcctgtcaagcacccatacagcaggtggtttcattgccctccatttacagacaagtaaactgagcttcagggtggctaccgcttgtctcccaagccacccagccatttagccacggaagaggtcatgactttttacaccccagtgaagctgaagatttttctttccgtttttaaaaatgtttactccccagggcagtgaacacctggtgcctctgtctagcgcaagaggtgaacgtttgccacttccgtttctttcctcctaccagacctgaccctccttttgtgacgggaacatcctgcaggcagtctgtcctgctttcatagactttgagaaacggggtccaaattgccggctgtgggtgggacaggcgacactgcagtgaagaggtggagtatttttgtagcggggaagaaatacatttcctctaccctcttaggttcagtgtttgggggtctgtgaattaaactcactcaagataaattaatgagagaaaagacagatttaatcacatacgtatgggatttcactgaaaaacgtgactcaaaagagcaggtagaaggtggggcccgtgactggtccgaaggtagtgagttatctcagttgattgttcacagtcagttacagattagactccttgttccactgtctcccctcttcccacttgttttgttttttttgagtcagagtcttgcactgttgcctgggctggagtgcaatggcacgatctcggctcactctaacctccgcctcccgggttcaagcgattcccctgcctcagcctcccgagtagctaggattacaggcacccaccaccacgcctggctaattttttgtatttttagtagagacagggtttcactatgttggccaggctggtctcaaactcctgacctcgtgatctgcctacctcggcctcccaaagtggtgggattacaggcatgagccactgcacccagccaactagtcttaaaaaaaaaaaaaaaaaaaaaagaacttagggcccgtatactatcttaataggaaaaaaggaaggggtgaaagcacatattatgggccgggtgcgatggctcacgcctgtaatcccggcacttcgggaggccgaggcaggtggatcacctgaggtcgggaattcaagaccagcctggccaacatggtgaaaccccgtctctactaaaaatacaaaaattagccgggtatggtggtgcacacctgtaatcccagctacttgggaagctgaggcaggagaattgcttgaacccacgaggcggaggttgcagtgagctgagatcataccattgcattccagtctgggcaacagagtgagactgtgtcttaaaaaaacaaataaaaaaaaaaaagcacatattatggcaaaacaaatgagtttttggaaagataaataggcccttaggagctgagatgggagatgtgaagtcttgtgacaatgtcttcttaggtgtggtgtggaaactactcacatcttccagggaagagtcagttgctcccagggagcagatttgggcctgtataccatcttaataggggaaatggaaggggcaaaagcacatattatgggctgggtgcaatgtgcccagtgcaggaggcagacgtggtttatggttgctgttgaaaccagtgcagggcccgattgctttgtattgagtgttgaggatcctggttttgtatcagccatgagtttgcagctctgggacacacttgatgttggctcaaggggaaatgaggttggaggggcagggtggttggattggatgtgggcctggggccattgctgatctacaaagtggtcatcacacgggaataatagagctggctacagaccacaaccagcaatattatttaaaagtaaggtcacacttttaataataagtcacattttaagttattatcaatttataaaacacactgttggtataatgatagcttttcaagaaggatataaaaaggcatgttgggctgggtgcagtgactcacgcctataatcccagcactttgagaggctgaggtcggcggatcacttcaagccaggagtttgagaccagcctggccaacatggtgaaaccctgtctctgctaaaaatacaaaaaaaaattagcttggcgtggcggcgcatgcttgtaatcccagctacgggggaggctgtggcagaagaatcacttaaaacctgggaggtggaggttgcagtgagctgagatcgcgccactacactccagcctgggcaacagagccagactccgtctcaaaaaaaaagaaaaaaaagaaaaaaagtaaaaaggcatgttgaaggtacctgcttgtggaaagttgcaacttgacgggaggtagggcgagcacttcttagaaaggtggaaatgggccctcctgctacagagacccacaaacatagactgaggcctgcagcctaggagactcaaaagaggcaaaggtgaataagagtcaaggtctccaagtcagggtctgactctgggggtgggggtcacatatgatggaggatgtcaggagggcttcctggaggtggtgacatttaccaggggggattttaggtggggtttgcgagacagtaggacctggctgaagagcgtaggctccttagacaggagtgggaattcaggcttgaaaatgagttggccagattgcaggggtcctcgaatgcaagggaagaatttcaactttaacagaggagcctgggaagctgtttgggaaaaggagtgataaagcgggaggggtcctccagcagagccctgcatgggcaggagggagcgagatgggaggtgggtgttggtaagggatgatcccagtggtccaggggagcagtcatagggtggaaactaaccttgtggggtctgggcaggaagggactgatttgagacaccgggaagaaacagccagtaggactttggtgagagggctgggggtcggggaggggggtgtggagagtgggagcttgagtctctgaaaacagacagtgttccaagggggagacctgaggcaagatgtggagaggcagctgagctgggaagctggaacggaggtgtggtcactccaggagactaagtcagggggcgaggggacccttgggagctatctagaccccagcactagggaatacggaggggagaaggaggggagaagaaccagctggtgcgtgtcaggcactgccctcgaggtcagatggggtggggctggatactggccatgaggattttttcaagagctgggttaatagtgagacgggcggacaccagatggctcgggctaagaagtaagtgggcggtgggaagctagaagccgtggtgtagacctactttgagaggttgggctgttcagacagggagaaagttcacagtttgaggaggtagataggtcaaaggaagagggtttgcttgtttttgagattggggcatcctgaacgttctcccaggccaagtgagaagaaaccagaagaggaacatgtcacccaaatgtgctgaaacagcccagcagctgcgctgcctcacagaaaatgtgcagaggcccctctgtcccaccatgcctgcctggggacggccttcactcgggctactcagggtttccccagcctgccaacccaagggtggcaggagctgtgggtgctcccagccccttctcaaggttggtctgtgggtagaaatgtgggctgcctcggggcgtcacagctacaaatgcataccagccctcagaaccacattcctgctccccagccctttcctccgcacccccatgcagaagcgcggccgccagctcacaaaggatagggagggatattgctcttggcatttgatgggaagcatctgctgcatcccattggggtgttgcccaggatggattggaaaagagttggcaggaaggctgagctctgtgctcacaacctggcttggtggtggccgaggagcttggcaggagcagagtgcaggacctgggaactgggggttggtgcatgtgtgcacgcacgtgtgtgtgtgtgtgcgtgcgtgctgggtgggtagggaggaagctgtgaaaccacatcccctcctctctgctgctgtgttgctgtgtgtttcagcagcacgtgggtgtcaccacacttcctagcaggtgtcaacctccaagactgttctgggctcttctcccagttggctgagttggaggtgggagtcccaactgtcccctgtggcttccagagtgggaccttgctgtgggataggctggccaatggtgctccctcccctgtgacccttctgttgggtgggtcacgaggaaggactgtgggtgttgcccacagacaggtggacatgtggcaaggacaccttgggaccttctttctgacgccccttgaagggggcactttctcagctttgagatgagtctctgtggatgtgggaagttcactatctcaagagcagcagccttggaaaatccaacacagaaccccgagtaggggcgggaaggggtcctgtcccgctcactggctgcctggcagagttctgcacaaggaagcgcctgtgttgctgtgggcggaggaatggactgagggctacattcgcttcctgttgccgctgtaactgcttatcacaaactcagtggcttaaagcaacagaggctccttcctttacagtgctaagggtcagaagccgatcagtctcaccggactaaagtcaaggtgttggcagaatccattcctgcctcttccagctttgggtgggaggctctgctggagttccttggcttgcggctgcatccctccagcctctgcctccatcctcctacagcctcctccttctctgcagtcagatctccctctgccttcctcttttttttttttgagacggagtcacccaggctggagtgcagtggcacaatcttggctcactgcagcctccgcctcctgggttcaagcgattctcctgcctcagcttcccgagtagctgggattacaggcatgtgctactacacctggctaatttttgtatttttagtagagacagggttttgccatgttggccaggctggtcttgaactcctgacctcaggtgatctgcctgcctcagcctcccaaagtgctgggattgcagccatgagccatcacacctggcctgcctccctcttaaaggacgcttgtgatttggggcccacctgggtaatctcttcatctcaacatcttcagttacatctacagagtccctgttgccacatgaggtaacacagtttgggaagggagagttattcagcctaccctaggggcctgtggtgtatctcagggcccttctgattttaagatataaagcaagaaaacaaactggctcaaggggaaaaaaggacacgttgaattctgttgctttaaatgtatatttttttattgtgctaaaatgcacagaacataaaatttgccattagtaacactgagtacattcacagtgtcgtgcaaccatcagcactgtctagcgccagaactttttcatcaccccaaagggaaaccccgtatccatgaaggactcactccccattcgccctctccagcccttggcagccaccagaatgctttctgtctccataaattcatttttaataagtgcaattctgtgtgactttaaaataaataaacatgagcacgatgagttgcttattggaaggatatccatgcggggaggccggcgtgtggagtgcgtaggcctccggacgggcaggagttgaaggggcgtggatgtgccgccctctcctccccttgctctttccttggggtcactgcctgagtatccctctttgcaaatggccccaaataatgtctcagcccccacgtctgcatcgcctcctagcttcaggaccctccaccaaaaaacattccaagcttcagactcactcctgggaaaattccaatggcctcactctcccttttgagccagccagatcccatggcctgtggcgggctgcctttgagtcctgagcacctgtgagctagggaagcaggacaggcacacccagggaaggggaagagtcgtcgtcagtcacagtaattgatatctttggaatcgtctaagagatacttagcgtgtgcctaaaacattcatttctttttttgtttgttttttgagacgaagtctcgctctgtcgcccaggctggagtgcagtggcgtgatctcagctcaccgcaacctcctcctcccgggttcaagcgattctcctgcctcaacctcctgagtggctgggactacaggcacacactaccacgcctggcgaatttttgtatttttagtagtgactgggtttcaccatgttggtcaggctggtcttgaactcctgacctcaggcaatgtgctcgccttggcctcccaaagtgctgggatgacaggtgtgagccaacacacctggccacattcatttcttaggagaagctctgcattttctgaaagtgaaatgtccccaggcgggtgacactgatggtgggatctgtggcctcaccagtgtcttatgagagatgccgctgtgtgtttcaccaagctgtatcctattgtcctctaaatgtggcttgtagacatggtgccgagaatgatctgggaggttcaaatcataatatggtccaaatcaacagctctctgatgacctggtattatcctaggatcaaattgagactatccgaggatgggcgtggtggctcacgcgtgtaatctcagcacttcaggaggctgaggcgggcggatcaattgaggtctgtagtttgagaccagcctggccaacatggtgaaaccccatctctactaaaaatacaaaaagtagccgccggacatggtggtgtacgcctgtagtcccagctacttgggaggctgaggcgggagaattgcttgaactcaggagacggaggttgcagtgagccaagatcacgccattgcgctccagcctgggtgacagagcaagactctgttccccggcaaccaaaaaaaaaaaaaaaaattgagactctccgagctgcactgtccagcatgatagccactggctgcacggggccatttgaacacctgaaatgtggtgattccaagtggagaggtgccgtgtgtgtgaagtgcactctgggtttcagagtcctagcaagggggaaagaaaagaatatcaaatatctgtcatttttacattgattacatgttgaattgataatattttgggctctgttaagtgaatgatattaaaattaatatcacctgttcttacattttttaatgatttcctttttcttttcttttctttttttttttaaatatggggtctcacactgttgcccaggctggagtgcagtggcacgatctcggctcactgcaacctttgcctcccaggtttgagcgattctcctgcctcagcctcccaagtagctgggattacaggtggctgctaccatgcctggctaatttttgtatttttagtagagacagggttttgccatgttggccaggctggttttgaactcctgacctcaggtgatctgcccacctcagcctcccaaagtgctggtatgacaggcgtgagccactgtgcctggcttgttcttacattttttattgtaggtgctggaaaatgtaaggttgcgtctgtggcccatgtgccgtttctgctggagggttggaccgagggccagccgagaaggctctggggctgctctacctgaatgctgagtgtgtgctgagcggtagagaactttgagaagtgctgaaggacagaggctttgtgtgggggatgcagccccaggccggagatgccttctctgtgctctggagaccctcatttggtgacagcaagaggaaccactgcaagaggggcggccacctcagcaaagcacccaggatgctggcctcccagctcaggaatccagaggcagaggaggggaggaggctgggcttggaggagagcagggtcttgggccctgggaaaagcctggggggccagaaagctgggggacagattgaggccagaggcaaagagaagaaggttcggagaggagggccaaggaagaagggttctgcccacggggagggagaggcccacggggcaggggcgtggtgggagctgcatcctcgaggctttctgttgaccctgacacctggccagaaaggagttccttctggcatcctttgtcagcggtttctggagctgccctttaggggccagtgatgagggtgccctgggctgggctgcagacagtggaaaagacaggctcttctcactcccagtgctggggaaattagcttcttggaggaagggggagctgtattttctgagtggccgcacttcctggcctagacgtgtgtgtcttgctgtaattttggcgactggtgttggtggtgcccattttatggatggggaaggtcaaattccacagatattgagtgacaggcccagggccttggatttcagtgtttgactcagaacccaggtctctgatctgccaccagcctccctcccattcagatgggaacagggactccgggcatgcagtcttctcccagacactcccccggctctggcctggcgcccggagaccagtagcagcagctccccacggccgttcactgtgagggtggggagggccgtgggaccaggaggccttagggggaaagttggccatgaggagtgggaagcgacgggtcagatgccagtgactgctggctggggagccgctggacgtggctggcctgtttggccagtgtggcgggtgccccggggcttcagtcacccccagccacgtgtgggggtgcgggatgggaaaggtaagagtgtgtggagcccagtcagcactcaacatgaggtcccgtgggggctgcctgagggcgtagcttccagaattcagcccctggccctcagaaggtgtcaccaaaggcttctttccatttgagtgaatccctcccagcccccagcaagccctcggaacgagcccactcccaggcgctctctcctagtgtgggagtggccacgcccctgctgggagtgactcacttgggttcagaggtcgtggcactgagatgggtctggcagatcccagcgtccaggcccagcccctatagtgtcagctccctcctctggggacccccttgcttgtgcccctctgggtcccagcacatcccaggcctgcagggagggggagaggaagagactgactcactggccaggtcccccaggggctggagaggctggagaggcaggagctggatcagatctgaatccagaggctctcggaggaagagctcagggtgagctgcgcccccatcccctgcccctcctctcctgctccttctcccttccatggtcccagccagcaagcacctggggtagaggggacaaacccaggtggctgtgttccagccctggctgcaggtctgaatggctttctggggtggctggccatgctccctgagagcccagctgtggcgatgtctgagcaggtaggtgggggagcacctaggaagcaggggtgtcaggcagagcacaaggagagagggtgtccaggtcagtttcaggacctggctgagaggagggggctcctcacgggcaccgcctctggcaagcacagggacaagggcaaggacggcatggccagaggtccctgggagcctcttcccctctcttcttcctagcagctccccctcactcttcccagggaccctgtcactttcctttagcgtgtggcagctccttggcgtccctcccgtgccttcaggttgcttctgcgccgggcctgccgctgggcgcccctatctctgcctgccccctcctcctgctcccctcgccctgcccccttggagcaattccccaccgagcctcccttcccaggcagtcgaggtccctccctacctctgccccgcgctctgggaggctccttgttccgcgaccacaaagcccctttgatcctctgctcggctctgagccatgtgacccggtgggcgggccgcggctctcggcgcgtccagcgcagcccgacgttccgctgctggggtgagtcctgctcctttgttcttcccagccttgcaccactggctcgggggctctcaggtggcgcggccgcgaggcggaccctgatggccatggtggcggtgccgggagccacgctgtccctgggccccggcccgaggccggcaggaccgagcggggtccccaggagaggggtggcggggagctcgatctccacgcggggaccagattttcggcctcaaaatagaagaatagggctttgtgtggtcacagctatctctttgtaaatatttggccaactaagctgagtggctaagttctcctgctgcccggagcttcttggaacatgtttccttttcgcaaggggtttccctggcttccaggagggccaggaagaaattcgaattggccaccgctttctctaaaatcactccgctcaagttatcacccctctgggctcccgaagaccggctggctggaggctggagatagtctcaatgctcgaaatgccgtaaccgaagctccccgcggcgccggcactgggatccagggagctgctgctacagcgcagctctggattcctggatgtgttggatatgtgcagggcgttcctgggaggagcggggagggagggtgctgctggcggggctggtctgcgtgtgctttgcttctctacaatggcatgctgcgtgtcggccatgcagaggcatgtcagtgagcaggggctgagggatctccctaacggacctgctttcagagggtcttttcatgctgggagaaccccagagactaaatcatgcagccaacggggtggtccccggcctcaaagcagggaggggcgaggagctttgtaggcaatgccatctgctcctgaaacgccgtcccagtgactctggggactgactcagcctccagcctgctgcacttcatccctggcccctctctctttgctttttcatgtgaaatctgctgtgttttggtcagaggtttggggaacagctctctgctcatctaagataagtttgtaattcctttcctggagaaaaatatgccacccggaagcaggttgagcagtggttttctggcaggtctgttcggggctgtggagacagcacctgctggatcaggatggagttggaatttggtttggatcccacatgagaaaacccgttggaagaggaggaagcagaaaaaggccccattccctaataatgctgtgggttttcctcctccattcattgccaccttgccttgaaacttaatggggccacgtgtgtttccatgaatgtcattctctttggccaactcccccggcagccccaggagctccttttcaggaaaaggaagaaggtgtttgcttagcatctagtatacgagtccttgttggaaaggtgggattcttgtttctccttgggtctcttttaggctgagatgtggtcaaggaaggcctgtggtgtggctcgccttttttaatgctcgtctctggagacctgagttgctgctgactcccagcttgccccttctgtcccctggccatttctgtgtcggggtggctgagacactattgcattggccactttgtgttcccactagcccccgcccctgtaggctgtcattgtgatggtgatggggccaattcagctgcggtggggaggacccactgtgtgcgcctggggggtggcgtggggcactctgggatgagaagatgcgacttctgccctgagagccctgctttaatggaaggcgggggcatagttgcaggcagaagccatcaagcactgtggtcagaccagcattccatgtcaaaaatggccttgttggccgggcgcagtggctcatgcctgtaatcccaacacttcaggaggccaaggcaggcagatcacctgaggtcaagagttcgagaccagcctggccaacatggtgaaaccctgtctctactaaaaatactggctaatccgggcatggtggcgcgtgcctgtaatggcagctactcgggaggctgagacaggagaatcacttgaacctgggaggtggaggttgcagtgagctgagattgtgctactgcactccagtctgggcaacaagagtgaaactctgtctcaaaaaaaaaaaaaaaaagccttatctgggcctgggatctgtcctccgaacactgggtccactgtgctccacaaggactttcaccccggaagccctagacccacttgggcaaccagagtctctgggttgaccactccccagccctggccagcctcctgggccaccgtattctcccaacttcctgttgtgccacggctggtccaagctgctcttatcagacaatgcgaggcacttccacaggaggggacaaccccgtccttaggagccccttctccctgcccccaggcctggtgcagtgtgtggcttccctgccggtgtcaaaggtctcaaggcccctttaagaagcctgtcaccaccaccagcagcttccgttatctggttcttctgtacatgtaagcctttcccatacaccccggatgtttagggcttccgccctctctccctggccgggagtgtgggaagagggctttatttcaatgcttgagagtagggtcaatggccagggtaagctgtgggggctcctccccgccggcccctctctgcagccctcaccttaacacagagcatcgataccacctgggctttgggaagacctggaggctgaccaccctggaggctcccagcgtcccacagccactctttggggaagaggcttcctgagggacttgtggcccttggctgggactctagtcccagagttctgccttccggcgccgagctttgatttgtttattgagtgccagcccggttcccggacaggtagggacctgttcccggagctcagcagagccttgggaagctttcccaggagggctcccgagggtggcggccatgcccagtccgctgtacgtgtgagtttgtttgatgaggaattggctgggaaggcgcgggtctaattacaggcccatgagggtccctctcgcccccacccaggaagcagcggagatcctggcacactcagcacctgggcctgtgcctgcccagctgctggtggaatcatgggagccttgctccggggcctgtagagcagcagtgggaaccttccccacctcagcccctcccagagttggctgttcaaactcgccgccgctcagcctcttcctcctctctttcatcaaccctgggaatcgcacactgcccaccccaccgggccccggagcgggtgcaggaagagagagcttaacacccagaggtctgggccttctgcaggcgcctgagctgctgtggcctgagctgggttccctgctggaaccatcacagtagacctaatgatctgcctgcaggagttgcttcatcccagccgactccggggctgcgggaaggggctgggccttggttttgctgggggtggggggtcagtgcaaagggcctgaaaagtggcagaggtgatggcccatctgtcctccccctggccggccggcctaaacgcgattggctctctttcttttttttttttccctcccttttccctataaataacactaaatgcgatttgtcaatgcattcatttgggttcagtagttggaccatgggcagaagcactccagatttgtcactttccctaagctaagggtggggaacaccctctgtgagatcttggctcctgagcgcccaagactgctcttggaaccccaactctgggtcggtctcaggggactgacgttgatggagttgctgacattgacctccggcctctgcatggccttcaggaagggggcccttcgctctctgtcccgtcgagcctggctggcagcactcccttctcaggcctgtgcccccggcagggcctgctgcccccgccctgctctgtgggtgccaggctccaagcaccaggtgactcggtcactgaatggtcactgaacagtcatccttgctggtgtccccagtggaatgtgcatggacgtcctccctcccccagatccttgtcttttatctctcagcctttgttccaggggccaccacaggaccaggaggtacgcagacgtgggtggcacatccactgggcagattcagccctgaacctgcacgccccctccaagggggcccccagcgggcggggttgatggtgccgtctctctctctgtcactagaacggacatgaggattgtgtcttgtcgatccacgtcctgagttcccagacgtcataggtgcttgctcaacgagtgtttgaatgaatggtcagcattgtgtgaccgcagattttcaacttttatccaaatagtttgtggtttctgtgaggctatcccgagacagtctcacaagaatctccattctccctgcacgctccgcacaaggtctccttggggggtttttcagaaaaagggccaaagagcagcatttcctcggggatttgaacacgatctcccccggggcaggggactgccctggaagattcccggcaccgcttcccatgcgccacgtgactaggagggtcttggggcaggatggtgtcttttgtgccttgtgtgctggggccggaggaaacactgcccgtggccggtgtcatctgccagccctgaagactaatgatgggctggacagtggccccattgagtgggagggagaatcgctgctgtctgtagctggggggccgggtgggtgggagccgaggccagggagaacagcgcagacctggcacggagaggcctggaggaggagcagggggtctcagccacccagggtgcagggacgccacacgaggagcaggtgtggtgtgcgtcctcctgcgggttctccacctcttggcttcgttacctgcactaggctttgtggtgagagggcacagagtggaggaaggtgccgtggctagggcaggccacacgctgtgctaatggattgctgttacctgtcgcctctgtggttttgctgtcaggatcctccagcaccaggtccccaccaccaggtatgggccccacaggcactactggctccccgaagccagggacagaccccatagacaatactgagtccctgcagccagggatgggcccccacggccagtaccagatctcagggaccagcaccgggtacccacagccagggacaggcctccatggccagtaccaggtctcagggaccagcaccgggtacccacagccagggacgggcccccatggccagtaccagatctcagggaccagcaccgggtacccacagccagggacgggtccccatggccagtaccaggtctcagggaccagcgctgggtccccacagccaaggacaagtccccacggccaataccagatcccagtgaccagcactagatgtccacagccagagatgggcccctatggccagtaccaggtctcagggaccagcgctgggaccctggatgactgaaggagggcacggttgactaaagctgcaggagccagcctggccatcctgaggcactaagccatcactgcggtctcaggggactcagactcctctacttgtcttcttgaattctggaatcagacacacctgggtccagcctttgcccccggggctgtgtgcctgggatggttgcctcacctccctgaagctcagtgagatggggacggctgcacagggcccggcacagatggcacccgatggcacagggtcacctgcttgcatccatacagcctcggccctcgctctggctgcgtaccgagagtcccatgcccagacctctgctgagtctccaagctcctggtcatgcctcaggcctcccgtgagaagcatcactgcatggaccatgcctcgggacctcaccttgggctgggaagcttgctccatctccccaagtctcccctagaggcgccccatgtcccatcactctcactgcttgaggggtcagataggggaacccagtgtgggaggcccagaggtgccggagcagacgttaagcgagttccgtgtttatgcgctgggccttggcagacaccctgaatgagcctcttccccaggaaggagattggggtcccagtccaagttgtggcctcaaaccctgtgaccaagagtggagaaaaggcaagacccctcctcccagtcttccagaacagccgatagtggtggaaacatggggttcacactgaatttccttgtaacttgttgaagagaatttagcccacattttcaggggtggaggtctggccgatttggcagtgtgcccgtccccctggccacagtttactctggaccgggcaccctggtgccctccctcagtgacgcagtgaagtcactatgacgtgtttagttggtgagaaagtgcctcctgtaatgttttactcttcttagagggtgaataagccttgtttattataaataattatttacagaatacatgaggtttaacctaactctgggccacggcagcgtcccctgggtaaacccacgcgccaccctagctagagcctgtgcccccacaggcttcctggactcaccctgaaggggggctggattttctgcctgtcccgatgagagggctgcaggacagtccccagcgagcccttctgagggctgtaacctcttcccctggtattttcctgctcgccaggaatgtttcaagcttccagcagaagcctacccaccatagtcgctttccaccctgctcaccatccctcctgccctcactcattcagcagaccccgtgcacagcccagtgcaggactcagggtgggaaggtgtcccgggtgggctggagcaaggttcccagccagggcggggtcccaaggtgggtccacagccaggactgtgatttgggaggcccctccctgccttgttccagccccggcaccgccgctgtccttgtgctcagtggagactcactggctccaggctctaaaacctcagcgaggtctgcagacagggaggagccccactcgagggtagagtgactgccgggtccatttgcctgttacgaaccacgtggcctcagacctgccattcctcctctcctagagctatggtcttttgtctgaaaaatggataatgatggttaccatgtcagggaccattttgaggacaaacggggatgaaactgaagaggctcagcacggaacctggacacagaagtgctaattgtgtgttaccagctgcggtggctgccaaggcccaaccacatggcagccacgggctgagtggcgggcgggaagtggggagcaggagcatgcaagatgggcattcctgaagtttctgatccagtgagataagtacacacccagctctaagatggagtgtcccaggaaggtggagactgcaaaggccttgtggcgcaggagtgtgagctgcacctctgggctctctagaatttcaccagagctcagggaggaggtcagctcagatataggggcaacgggagagatgggagtgagaaaatggcttggcgtctggaagtggagcctggaaaggtgggcgtggggacagaggagggccttgggggccatgggcccatgcgtccaggaggtggaggcagtgaacggggccacggtcggccccacacgtggcaccaccagccctgctgagcctgcacctgctcctcaggccccctgagtgccactaccacctggcaccccttggtctgattcctgcttcctgcccgcctgggaagagtgagaccacttgcctaaagtcccttagctgtccttaaccattctggctgcctcctggccctgtccagggttagccgttgacctgaactgcctggtgccacctccccagactcctggggccttgccctggcaccaacagccacctccatcttcatcattcactcgcacattcacccagcagtgctttttgggcatccactcagcaatatcaaggcgctgagatgcggctgtggttaagacccgggcccggtctgtgaggacctcgcagttgccatttccccagagcacagccccagccaggcacactgtggggtccagaaagagaaactaatacattgtgttcgtccattttgagttgctataaggaatagccgaggctggggggttatttgactcacggttctgcaggctgtacaagtggtgccagcatctgcttggcttctggggaggccccaggaagcttttcctcatggtagaaggtgaagggggagctggcacgtcacatggcgagagagagaactcccagactctttttttttttgaaatggagtctcgctgtgtcagccaggctggagtgcagtggcacaatcctcggctcactgcaacctcagcctcctgagtagctgggattacaggcgcatgccaccgcgcccggctaatttttttgtatttttactagagatggggtttcaccatgttggtcgggctggtcccaaactcctaaccttgtgatccacccaccttggcctcccaaagtgctgggattacaggtgtgagccacctcacccagccctcccagactctatagcaatcagatctcccggactttgtgaccgtggggagggcaccaaaccatccatgagggatccacccccatgacccaagccccaccccccccaggccttacctccaacatcagggatcacatttcagcatgagatttggaggggacaacgtccaaaccatatcacacgtgacctctctgtgcgtgcgtcagtttctacatctggttaagcagtagaagctccttctctgttccttgttgagagagcggtgggggagaaatgactcagggatgggaggctggtcccccgaggggccctggtgtttgtggagtgggagtgcgggaaggcccctacgttgtgtgtgccgtgctgggctggctcctcacagctcaccgtggtgctccccgaggactgctggggaggaaagagctaattaacttggggacccagctgctgaagttatcattaaacttgagcagtccaggggcccctctccttctgggtcctatgtcacccagcacagtggggcttaattgaattttttctcatcccccaaggctcctggctggcgtggctggggtttgggatacggggagcgagagggcttgggcctcttccagatttggagtgggttcaccagaaatggcccaggaaaccgcgggggccacccccagcagctgggggctcctgtggtcatttcctcttggtcctgttgagcagccctggcccctggagccctcagcaagggatgtgggggcctgccaggccagggtcctcactgctgccgctatgcacagctgcatcttgcatccggggagtggggtgccgagtggggtgtttgggaggcaggttttcccttgtcccttctgcccagagaccttggggatgagttgagtgagacccttccggcttctgactggctgtgtttctgttgccatcccccactccttttaagtggaggtttatgacttccttctttatttaaaagggtcatttagtgacttagcagatcccagtctgtgttacccagggcccttttaaaaatctgtggggaggctgggcttggtggctcacacctctaatcccagcactttgggaggctgaggcgggtggatcacctgaagtcaggagttcgagaccagcctggccaacatggagaaaccctacctctagtaaaaatacaaaaaattggctgggtgtggtggcacgtgcctgtaatcccagttactcgggaggctgaggcaggagaatcactcaaatccaggaggcggaggttgcagtgagccgagatcacaccactgcactccagcctggacgacagagtgagactctgtctcaaaaaaataaaaataaataaataaaaataaaaatccatggggggacctctgtgtccattggctggtgtgaggagagggtgaggagctgcagagaaggtaccaggctgaggaccgcccccacccttgggctacagaattgaaggaggggacacatgaaagatgttcctagactcgggctggaggctggggacatccgagggcaaggacgacgctgtccctgctcttgtttgcagaggagtgcacagggctcaccagcttcttgttgctgtttaagtgatagctttatggagatagaattcacatactgtgacgttgacctttttaaaatctacagttcaatggttttgctgtattcacaaagtgattgtattagggtcatccagagaaacagaaccaatagaaggtgtgtacgtgtgtttagataaagagatttattattatgaggagttggctcacctcattacagaggttggcaagtgccaagattggcagagtaaatcagcaggctggagacacgggagagcccatgttgcggctctggtgtccacctgaaggcccaagacccaggagagccaatggcgtcgttccagtcccgagacccaggaaaagcgcatgtgtcagtttgagtctgaagcaggaaaaatctgatgttccaggttgaaggcggttaagcgggaagaattctctctcactcaggccttgtgtcctcctattcagaccttcaggcctttgtcacaaaattacaaagacctgatcagaacaaaatctgagaaaaaaccctttccttctatcggttttggattcattggctgggaccctggaaattagactgacagagattaacaggaaacaagcataacaattcaagtaagttttacttgacaccgagccttcataaggaaatgaagacccagagaaaccgttagcctgagcggtttttgttttgttttgagacaaagtctcactctgtcgcacgtccaggctggagagcagtggcccgatcacggctcactgcagccttgacttcctgggctcaagctggggcccagctgccggccccgggagctgctctgaacccactcttaagtcccagctcagactcccaagtagctgggactacaggcatgtgccaccccgcctggctaattttttattttttgtagagacagggtcccactatgttgcccgggctggtctcaaactcctgggctcgagcaatcctcctgccttggcctcccaaagtgctggggttacaggtgtgagccactgtgcccggcctaggcctgaacagtttttatttgttttgcttgttttttaaatttgtttgttgcttgttttgagcagtttttttgtttatttcttttgcttgtcttttgcccaggctggagtgcagtggcatgatctctgctcactgcaacctctgtctcctgggttcaagccattctcatgcctcagcctcccaagtagctgcgactacaggcgtgtgccaccacacccggctgatttttgtatttttagtagggatggggttttaccatgttggccaggctgttcttcaactcctgacctcaagtgatctggccaccttggccttccaaagtgctgggattgtaggtgtgagctgctgtgcctagcctaggcctgagcgtttttatgctgggtttgatgaagagtggaaagtcgtgggaaactgtgacagagcaacaaaagatgagctgaacagtgagcccgtgggggtctcggcaagacctgtgtactggggcccctctcagatcctctgtctctggagatgaggctgttcctttccgctgggtgtagggagggcacctcttacgtgaggggcttatgatctacttcagagaaggggcaggtcagtgagttcttcttggacctgccatttcttaaattccttcagctgaaaatatttactatgccaaggcactgtatcttggagtgtgcgttccaagccctgttgccttcaactgatcgggtgaggcccacccccatcagagcacacagtctgctttacccaggctcctgattgcacccttttcctgtttgccccgagaatactcaccagcagtgcttgtggctgcagcgttcaccccaagataaatttgccgggaagtatcttgcttttattattattttcacatcactctagtatatcgactttggaaacaaaagacatcattctgtttatagcattccatttttagtagtggtatttcctttaaaaaaaaatggtaattctcagctgggtgtggtggctcatgcctgtaatcctagcacttgggaaagctgaggcaggctgatcacctgaggccaggagttggagaccagcctggccaacatggtgaaatcccatctctactaaaaatacaaaaattagccaggcgtggtggtaggcacctgtaatcccagctacttgggaggccgaggccggagaattgcttgaacccgggaggcagaggttgcagtgagccgagatcgcgccattgcattccagcctggacgacagagcaagattccatctcaaaaaataaataaataaataaaatttaaaaaaaaatagtaattctcgatcgctgaaaatgtcaaatcctagagaacacagcattcctacaagtgatgttaacattgttcttgatcagttgttggctgaagattcatttgatgaatctgatttttccagaatagacgactcagatgactctgttgttttgcttagaaataactgcaggaacaatttaaaaaattttttttctttttaatttttttgttttttgagacggactctctctgttgcccaggctggagtgcagtggcacgatctcggcttactgcaacctctgcctcctgggttcaagtgattctccagtcttagcctcctgagtttagctgggattacaaggtgcctgccaccacacgtggctaattttttgtatttttagtagagacggtgtttcaccaggttgaccaggctagtctcgaacccctgacctcaaataattggcccatgtcggcttcccaaagcgctgggattacaggcgtgagccaccacgcctggccagtttttatatttaattttcacacagagcatccagtcagatttgcttcagcctcaaagagcgtgtttatgtaaaattaagtgagtgctggcagtgagctgaactttctaaaaggtaaaagggttaaatattaaactcatccaaaaacaccttcacagacacactcagaataatgtttgaccggttacctaggtgccccatagcccagtccagttgacacagaaatttttttttttttttttgagacggagtctcgctctgtcgcccaggctggagtgcagtggcgcgatcttggctcactgcaagcttcgcctcccaggttcacgccattctcctgcctcagcctcccgagtagctgggactacaggtgcccaccaccacacccggctaatttttttttttgtatttttagtagagatggggtttcaccgtggtctcaatctcctgacctcgtgatccacccgcctcagcctcccaaagtgctgggattacaggcatgagccactgcgcccggctgacacaggaaattaaccatcacagttacacagccatcgccattaatcccagcacatttcatcatccccaaaagagaccctgcccccattagccaatccccattcccaactccgggctctcagcccctagccaccgctcatctgccttcgtctctatgaattcacctgttctagatagtttgtataagtggaatcgtacagtatgtggccttggtgtctggctcctttcacttggtagaatattttcaaggctcatccacattgtagcaggtgctggtgcttcattctttttcatggccgaataatattccatcgtggatagaccacactgtgtatctcttcatctgctgatggacatttgggttgtttctgctttttggcataattctgttgtgaagaattctgcagtgagtgctggtctacaggtttttgtgtgaacatgttttcatttctcttgggtaattgcaagatcatgtggtttagccaaccagcctttaagccatgtgtctgctgagggacccaggcctggtgggggtgcattgctgtgcttggccagccaggtgctgcgagtccgtgtcgcagccatttctctgtgctgtgctctgaggttgtctcgccggcaccgggcactgtgagccccaggaggccaaagccccctttgttttatcttgagtccaggcctcgctccatgaactaggatgaatggacattgaatcaacgcagggatgggtggggctggggtggggacgcagagtgaccccgggggcctgcagctgggtcctggctgctgacttccagtttcctttgcctgttggagcccagaacaagtcagaaaggggaaatgcaaagttcgagtgtcttttctgtggtagactggcaggcctgggtgggtgagccacttgcagctagttgcagcgtgagagaggaagtgggaggggagggagagggtgagtttggtgtaactcacccctggaaggaggctgggctgaggctgggggaagtgacttttatttttctgagaggattcttccctggggccaacttcaaaccaagggagacaagaccttcctgggggaggctggaagtgctggggcccccaggtgggcaggtctcccagggccaacgtcttggggaagctataagttaccatgtttctggactgtcacacacacacacacacacacacacacacacacacacacacacacacacacacgagtaaactgtaacacaaatgtgtgcccatgaaagtgcccactttaaaccaccacacagcctgtaaagcgaaggccctggcccgcatctgggcacccactgcccagccagccggtaggcagtttgcactgtagtctgttaccatccctcagagatgcagccgaggagcccagctggcttggagggcccagtgggcgcagcctcaggaaagtggtcaggcccgggccaggccccttccccctcccagccttgggagaaattaccatatgaatgtagctccttcccggagttcgggctggaagggcctgggaggggacaggctcccaccccaggagcttccaggttccggctgctgcctgtgttagctgcgtgagcgtgagcgagccaggggtcactactgggtggaaggaagaagcgggcatttcttccaggaggtcaccgttggagtcccacagtaggtcaaccccaggccctgggtcctcgggaggaggagaaagaagagaagcaggaggtgtggagggtaggccaggaccagaaggcacacagggtcggggcagtgtgggagaccctgggggctccctcatttaaccagctaacatcacagcgttcataagaacacgctattactgcagttttattactttgctctgatttcagaaggcacaactgatgactttagggaacggagaatctgaggaaggcctcgcaggagagggtcagatgcgatcgagtaaatgtgagccgtctgtaaactgtagagtgcacgcacagcaccggtcagccctggggtcagtgttcccctggtgctcagctcggcctctgcaccttttagtgctcggctgggctctgtgggggtcagggctgggtctggtacattagaggacttctaccaagcccctggcagtgtctcagttactaaatccagtttgccagttactaaatccgctctgccggttcccgaatcactcttccgctggggccggccatgtcacgtcaggcttttcatgcaggacggcagatggatagacgctgggaccaagtcatccttgggccgcgagacgtctgaccttctgctggtgtctcagaagatgctagctctccgtggcatgtcttccacgcggtgcttggggaccagtggcctctaaggggcccccctgcctcagcgtggggagtggcctggccaaggtctcagtgtctggttggagccaggcataggctcaggtgtactggctggaggcctcctgcccatgggctctgcctgtcctgtgtccctggtccttactgtgtcttctgtgttcctgggagagaccccaggggccctgagcccagcactggggttggggagtgggcggggaagagggtggggattagggtccctggctgcagaacagccaggccccaagtccccactccactcccctcccaccgggcgcctcatcccacactgaccatttcctgaagaaaatttcctgaaccggcctcccaccccggctgtcccaggaagcccatccatccttccgccttaatgctttgtggctccagaaggatggtggaagccggaaatcatgagtctcattcacaggcggccacacaccgaagccgcggagacgccgtgggaaaggactctggccagcgcggccggcacagagggagcggtgttaccggggtagacgggaaccgtggctgcccccatgctggtctgggagagacgaggggccggacgaaaggacagcagactggccattcattcatttattcattcactcattcacagcgtcttactgggtgcttcggacgtgtaaggttttgtgggtagtgaatgcgacagaccccagacagcaatcggagggccacgtgtgtaagaactgagggacctaggctgggcgtggtgtctcaagcctgtaatctcagcactttgggaggcagaggcgggcggattacgaggtcaggagatcgagaccatcctggctaacacggtgaaaccccgtttctactaaaaatataaaaaattagccgggcgtggtggcgggcgcctgtaatcccagctactcaggaggctgaggcaggagaatggcgtgaacccgggaggcagagcttgcagtgagcccagatagtgccactgcactccagcctgggcgacagagtgagactccatctcaaaaaaaacaaaacaaaacaaaacaaaacaaaaactgaggaacccagtgtagatgagctatcccgggaaaacaagtgggagttctaggaacagcatggggaagggatggtcccggcagggaggacctctgtgggtagccttgttggaagagctgaaaggcagccagagaggctgtgcgtggatggaagctgaagagtaggttaggggcgtgtgttttgttaacaaagacttcaagcatttactgaccaggcacaacactatgtgcttcataaataaatatctcatttgatccccagcattcttatgagacagatgttattatcccatttcacatgtaagaacattgaggcacagagtggttaagttacttgctcagggtcacacagcacgtcggtggtaggcaggattctggagccacaggaatctggtatatcccaggtgcaatggaaaccagtcacggcttcatagagggaaatcatcagattagtaaattttacacacgccccctggtgctttgaggaggagggattcggacaggggcagctaatggtggtggctgtgagatgtgttgggttaacattgatgagagtttgggatggatgagtggattcggagtaatggaaatggagggcccaggcccggcccctggagatctagctgcaatagctgttggctggagaggctgttcacttagatgggggatggggtgggaggcaggtgagatgagagctccagagttcagcctggggcacggtcattgggttcaagatgccttcagatgttggggcttgacagtgacagtggctgcagatacccaggacccagcagagggcctggcacagcggggcccagggacacgtctgtgagtcaggctggcactcaagtgtgaatctggacaaagaaggtggcattgttggcattgaatgctcaggggctgggtgaagtcagctagggagaggggctctcaaggcaccaggactgactccgtgggtgagggcggaggaggagacggcagaggctgagagaatagccagagacaggaggaaggtcagcagagccatgcacagaagcctggagaagatttgaggaaaggaagggctgggtggtcgtcattccctgcagctaggaggcaagggtgacccctgtgtgtttcattcttcagaggattggtggctccatctggtcagaaccccaagtccagagatgcatctgagcttcatgccatggtgcaggcagcaggagccatggagcaggcctgcggggtcacggcctgcctgctgcttcctggtgtctctaccctgagctcaggggttgcttggatgccctgtgctgcatccccccaggcggtgttccagagaggatgaaagtggctatctcaaggtgtgaccaggtagcggtccatgcacactgctttttcctggggagagtctgggatggaagggtatgtgtgtgtttctgagactccttgaataggctccatgtacctatccacccatcttaccacccacccacccatccactcactcacccatccacgcacccacccatccacccatccactcatccacctgtcaacccatctatccactcattcacccatccactcatccacctatctacagtcattcactcatccacccatccactcatttacccatctatccatccactcatccacctgcccatccactcacccacccatccactcatccacccatccacccatctatctatgcactcatccacccatccactcatccacctatccactcattcactcattcactcatccacccatccactcattcacccatctatccatccactcatccacccatccactcattcactcatctgtccatccactcatctacccatccactcattcacccatttatccatccactcaaccatccactcatccacccatccactcatcatccgtccactcacccatctatccacccatgtatccatccactcatccacccatccactcatctgtccatccacttatccacccatctactcacccacccatccactcacccatccatctacccatcctctcatctatccatccactcatctacccatccacttatccatccatccactcatccgtccatccactcatccacgcatccactcacccatccatctacccatccactcatccacccatccacttgtctactcatccactcacccacccatccactcatccacccattcactcatctactcatccactcatccatctatccactcatccaccaattcactcatccacctatctactcatccacccatccatccagtcattcatccatttgctcattcatccgccaacccatccattcacctgcctgttcatccacctacccatccattcatccatctgtccatccatccacccacccactcacccattcacacacccatacacccatccatttatccaaccatccatccccatccttacttcagaaagcatttgaagttgctggggtgtgcacttggaaaatgcgtcataagctttcataggcctctctttggcttcctcacttctttgattggtctttctttcggacatgcaggattctgagcagctcttctgggaggtgggtgcagtccaggtaggctgcctgcaaagctaggaccgagggagccacatccaaggcactgtgggttcccaaggcgatggcactgtgggcccactgcttccagacctcctcaactcccaggctcctgagcaggaggactcctggggcagggcctggagacgggaagagaaaacaattccagtctctcaactcttgtcagtccaggtgggtgctgcatggattgggggcacctggaacagttggccccttcacccctttcccccacctttccagcccctctggctataatcagacagttgtgtgcgatgtctttctccctcctgaaggggtcatttagtcaggctcctactcatggcccaggaatgtgcccctccctgcctgtcccctacccccaagcaggccgtgcctccagccccctgctgtctctgaagggcctgggcatggggcagcctctgcagcatccccagggcccgagctgatctgcacagcagaagggaattgggggaaagctttttttctacccagcacctggcagggggccaccctgttgcaccccagagacccttgtctaagttttgttatttcagatgatttcataagttgggggaggcggagccccagcccccacagcccctgttgttgcctcactgctgagctctgctgtgtatctgctgacaggtctgctgatagcagaaggggctggagagagggaagctctgggccctgccctccccaacccctgcttaggggacatccctgataagaggaaattccagcctgtgacagatggccagtgtccacccacccacgggggaacttttctttctctttgtaagtttgcagatttgccaggaactaaaggaatctctggttgacaggccactgtggacatggctggagggctggcacgggctggatcttggggttgctttgaggtaggggccgctcctgctggaaggttccttggggtggggaaggcatcagggccattccctgaccctccctctgcagtggatccacttcagagcctgagacaaggcaagggggcagcagaaaacagaatataaaatagccccccccaccacacaccgcaccagaagtcagaggattcatccttggcctgccctccctgcagcctaagttctgagagtggctctttaggaagtgaatggtgatggtttgcaggtcagagcttgctctggcccaagattgatgtctcaataggccgcggagcctgggtgaaaaaactcaggctagggaggtggtgggttgcaaatgaaagaacagaggagggcctcttccagaaagcggcgggtggtgtgaggagcccttggaccttgtccaaatttgactttaccgactggggccaattgaaaccgtgctggcagaaaggcaaaactgcttgagattccttcctccacaatagaggagaggtttgcttgaaagggtttggcgagggaaaagctggaggaaccttggccggcagtaaaagtggggacccccgccccctgcctcgggggcgcctcggcccctgaatgaatgaaagaggaggctggatggagacagactcacaccacctgtcccttccaggtcctgcaaaggagcacacagggttcttgttggctcttccaccttgttagtcaccaagaaggagaaaacaccaacaggggaactgtaaagctgcagttttgtttaagccccatagtggaaaccggaaagagctccagctcggagaaaaatgcagctctttgcctttgcaaatccgtgtctttctctgggaggccagagccattgtgctcgatttctaagcagggtttcagagtgtctcaggaggggaaggcagagtctcagatttccggcatcccaggtcctaaccaggctttgaggagacgcttcctgtcccatacaaagtgtgaagtgtaatttgatttggagttagttaacaaattagatgagctgtgtgcattttaaaaattcagtccttgatcccccacccacacacatttgcacaatttggtcatttatattcagtgtttccatctttagaagagaacaggaagtccccagtgacatttatggagtgtttgtagtagcttgggtaggtcagtaggaacacaatgcagtgaaaagcagagttgagatgggaaaatatcctgttttcagagccccccagggatgacattccttatcgtctctgtccacccgctctggagtccactccgcaaacagcaacttgttctcacttgagagcttcctcctgccggagctcagggatggagagcagctggcctcagtcttctcctcttacctctttgtttctcagactcatcttccaccttgaataattgtttttaacctgctctccctcttctctagctgtagaacccagaactttgtgtgtgtggtcaaaagtttagagagtgctgcaggtaatgctgagataaccctattaaattctgtaagttctcatcacaccaagtttgtttgttttttttaattctcattttattttatttcattttatagggatggggtctcgctacgttgcccaggctggtcttgaactcctgggctcaaacgatcctcccgcctcggcctcccagagtgccaagttatttttttaactgggatccacgggcctagggattctttgatgaaccgttcaaaatacgtgtgtgtctgtctgtctgtcttcaatgtatacttttctagggagagtctttacttttcaccagaggtttgtggcacacacatgtcctgtactactgtatcagattgtgaattccttacatgttaaagactgcttcaaatctgtccggaagtctcggctaataaacatttaaataaatgaacttcaaattcccatgtgccaccactgttttcattctgactactctcaagcctgtagtgtcatctttttgttactgtgaagtagacactcaataaatacttgtcaaatgaatcaatgttatggtcctggtccactaggaccccaggatcatcgtctaccattattgtctatagtttctttaccatcttgttccagagcagttctttctctgaggtctgctcacctctgcacgtgtgtctagtttccagccctgtcgccttaccattctctttcctttacctgcatttcctgaactgttaatagttaacaatagcttctccctccacccactcactcatacctgaagtgagaagtcatcattgaggtctctgtggattttgtcagcccaacctggggcggcctcctggaggtggagttttcagatgagggatggacattttggtgtctgctgggtagatctacctgggagctttggcaggggccccagggcagctctgcctctttattttggctgtgggacccctggtgcactagggtttctcaagtaagcatctgtgtcctgggagagccataggcaggcctgagagggcccctggaatctgggacccccagcccggcccagtagctggtaccatcatctttcttgcaagggaagttatggaaactaagatgctaatgtgctttgataggcctggggtggctctaagccctgggaagagccctggcaactttccctggctggcgggtagaatcttctcctggcagttcagggctctgcctccagctccctgggggagagcaactgagggaggagctggaggccaaggcctcagtgctgagctgcctgcaccgcagctgcaccttctgggtcctggctgcaggaaccccatacttctccagcctttccatggttcccgaagacctggcctggggagggggtcagcagcctggggctcacctacctggcttcaaatcctggctctaccgcttactcgctttgcgaccctcataattgacaaaagccctctcggtctcggtttccttatctgtgaaatgggacaataacagtggctaccttataggattgtgtgatgatccatcagttataatagctcctgagcagcgtttagagtaacacctggggctcggtgcagtggcttatgtctataatcccagcactttgggaggccaaggtgggaggatcgcttgaggccaggagtttgaaaccagcctgaccaacattagtgagacccactctctaaaaaaaaaaattagagtaacgcctggcacagagagcccccagtaaacctcggctgctgtgatgagctttgtttcttcatttgttcattcattcaccagactttttgccggggcttgccgtgagccctacgctgctctgaagaaagccgggctggggtgagcgtgatggatgaggtgtctggcttcacaaaccctgtgtgggggggttgtggtgagaggaaaccgcacacatcattattcagttaccatcgtggggagactgtctggacgcagagagcaggctctgtgtgggagcggggagggcaagccctggttgcgaggcagggcttccccaggattcagcagggatctgaaggactttgcaggcacccagggagataggagaggaggagggagcagccctggccggacactgtcctcctagcattgcctgcatcagggactcactcagctttaagaagcccctttgtgggggacagggagcatctgttagtttataggacctgaagtgcccccatgggctcaagtttctgggaaggcctgcaggtggccgtagggctgccgcaggggtgctggccccagggtctggattcaggggagcctgcagagggagggcagctggaggctgctccagtgtgcattgttacgaggcaaagtaaggagactgctgggcccacgctgggccggggtggatggaggcaaggaagtcttcgccggggcaagggcaccagctgtagatgccggcagctttctcctggacacgggcctggaaggctgacagggtgtggtgagtgccaccggctcccctgccgtggcctggtcagtggcttcacaggcctccgtgggcaggaggaggatgaccttgcattctgcttggccaccattggcagtgacagacaaggtgtgtggggatgtggccatttcggtccgtgctctgagagccaggtgtgggttgggtttggggaagacaggggaatggcattgacttgaccctgagcactttgtcctggggtgcaggcccggctgtcactcccctggagctgggaatggcattgggcggtggctcagggtcccttgccccagcggcaccatctctgcatttggccagcaaggctgatgggacttgtgtggacatttctgggacgtagaccaggcagcatgacacacagggaggggtaggcagagaagggcggcccctgggtcttggtttccaagtcaggctttgcaagcctgctgtgtcaagccctctctcggcaccaggccaggtgggccagggtcagccctggggctgtgatgagtgtgagtgcccctaaagtgtgtcatgtccaatagctgcctcctctctgggcactgcctcccagccagatatcctacagcccccgtcccagccacagacagcaatctgattccctcatcctcggcaggtcctggggttggggtaagaatttgtcactaagtgcagatgttcccagagggtgctggctcagggctgcgtggattacagccctttcatccctgccttagacccacctgcaactctggagaaaagatggcccagtggacgcctgcggggaggagggagctggtccccaggatgagcagatttgggggcagtccccatcacgggaccggtgacctactgccaccagcgccagtgaatggcagaggggccctggcataaggcctgggttcagaatgggaacctgcagagaaactgtcaaggtctcccgccacctgacacctccgcctggctgccaccctagaaacacccttgctgcaagaagatgggggagtttgtctggggcatggtctggcgacaccaacttgagaacctcaggcctaagtgttggcctctgggcctcagctgtcctctgagctgtaaagctggctcctgggcacttgtggaaaacactggactctttattttattttactttacattctgggatacatgtgcagaacgtgcaggtttgttacataggaatacaagtgccatagtggtttgctgcacccattggactcttcaatccagctccactagaaatgactgccttctttcccttcttccgtccctccctcctcccctcccttttttccttccttccctgtttccttccccctccctccttcccttctttcccttcctctcccgtcctcatggggatataatttccatattacaccatccgccgattcagaaagcacagttgagtggcattttttcacaaccttctataagcatcacctctaattccagaacgttttcctcaccccaaaaggaaacgccatcctcggtacacagtcactccccctcccccagcccctggaaatcaccaatctgcgctttgtccctacagatgtacttattctgaacatatgactagaaccctaaaagatgtgactttttgtgcttggtttcttgcagttggaatgttttcagagttcatctgtgttggcgcacgctcgtgcctttttatggctgagaaatagtccgctgtgttgactcagcacgttgggtttctccacgcatctgttggcggatgtgttagttatttctggagccgggtgtgttgtgctactcacgggctgcactaggagctggggatatcactgagtaagccacagcctcgggcacccaggagctcgcagagcaggagctgggagggaggtcaggaggtgcatggcctgtttgccaggctggagagacttgcaaaaagtcactttgagccagaaaccagagcctgaggcctctgactcccagctgcggagccgggagggaagctctgcattttgctttgactgtggggtgacgtgtcagttactgtccaaatcagaacctttctgagagtcgacgtgggtactgctgataattagtctggatacccgaaagaatggaaagcagggacccagacagatccttgcacaaccgtgttcgtagcagggcgaggcctggaggtgcgatggggatctcaacggggcagctgccgtcttgctggagcccacggtctttggggggggtcacaggtgttaaccgcatatcatacaagcaggagtgtgaaatttcagggttgccaaattcagtgagggtcttgtgctggcctggccacttacagtggcatttcaggaaaaaaaatcactctatggacctcagtttccccattagtaaagagtaggttggactggaattctgtaccatccagtatagttgccatttatgaaatgtggctatttaaatttaaataaaaatagaaattccgttcctcagttggactagctcagtgtcaagtgctcagaagtcacttgtgaacacactgtggcaattcctcaaaaaacgaaaactagaaccaccgtagcatcccataattccacttctgggtgtggattcaaaagaatgcacagcatcttaaagagctagagatatttgtacacccacattcatagcggctctgttcacagtagccagcgggtagaaacaacccgaatgcccgcggtcaaatgaatggagaaatcaaaggcgggacaggccgggcgtggtggctcacgcctgtaatctcagcactttgggaggccgaggcgggtggatcatctgaggtcacaagttcaagaccagcctgaccagcatggagaaaccccgtctctactaaaacaaaattagccgggcatggtggcgggtgcctgtaatcccagctacttgagaggctgaggcaggagaattgcttgaacctggggaggcagaggtttcggtgagccgagatcgcgccattgcactccagcctgggcaacaagagcaaaactctgtctaaaaaaaaaaaaaaaaagggtggaacatacaaggaatttgactcagccgtaaagaggaagttaggatacctgcaacagcaagggtgaacctttcgggtattacgctaagtgaaataatttggtcacaaaaggacaatcctgtaggattccacttataccaggtccgtagagtagtcagattcagaaaaacagcagaatggaggttgccagaggcttgggggatggggctggggagttgtttaatgaggacagtttgttttacaagatgaaaaagttctggagatttgttacacaacaatgcgaatgtacttaacaccactggactgcacacttcaaaatagtgaccgtggcaaacgttatgacaattaaaaggaaaagtcacgtggccagtggctaccacgctgagcagcgcaggcctcggacggtgtcgtggtcacagacaatggagtgggtgatctttaccattgtttccagctgtctgagcaccatggtgtcctggggccaggatgaaagtgtctctgggtatgggggtctctgcttttcccacttgggagtcctgaaggcagaccccaaagctcacctggccaggtaggagagcgaggcgggctcttgcattgctctctgcgtgcgtgcctgcctgcgggccagccggggcctgcaaggccgcctctcgagggaggggttgcaggaatggctctcacctgtgcagaaggcaagccactgccctacgtcaatggcaaagatggggctcggctgcgttgtattattatttctcaagcggggcccctggtgggcaggatgtttggtttgatttgagtttctgcagtgagtgctggtgcctgtggagggacccagctgcagctgagccggcccctccctcgctctgggctccaggggcgttgggggcgagaaaggagagttcagggggcagcgcctccccccaggtcctgctggggagggttgagggatgctggggggaggtgggggcgggtaggggctggtcccagtcccaggcaaaatggctctcagacccacaggcagatggaagcgattttcggtcacgtgggtggggactgaactgctgccccgcaaggcaaggccccatgtctggcttcaggaagcggccccaaagccacatggtccatggccagatgcagggctgtgtctttgtttatttaaaggtcctggaagcccaggggagagtatttctgaagggggagcaggagcaggagcaaagccctgaaggcttccaggctgcgtggcctgggtgggggccacgtgggggcacagagagaggagccctggcctccaggtccgcctgtgggtattgctctcagcagtggagatgtgtggacccccccttggcatttcccaacaaggaattatattgttcctttgttcccccaattccataagataggaattcctgtgccctgtggaggctgagaagacggggaggtgcctgtgaggataaaccagcccccagtttctggcttccagagtcttttcctctctcacctctgatgcctcaggcctggggagcctccctccgacaccctctgaccgctccagtgaaataggccgagagggatggcttgaatcggctggggatgcaggctgcagccagggggctcagtgggcatttcctgagttcggttcttgccccgcaagtggaagggcagttgaactgaagtctcccactgcccctcctggcctggaagcctgcctcccaccttctgggcagagtgaggagtgggcgtgggccgggagggctgcctcctgtctgggagggctgctcacttgcctgtcacgggggatgagccccctgcagcctcccgtgctgtggccctggctcccacgccggctccactcccctgtggctgcccctgctgggtgcccaccggtcccagggaaaagccactcccctcccggaggactggcgggaggggccctgcctgggagcgtgccgtgtggtccctgtcttagcgcaggatgcctgaggccagatcctccctgggaggcaggatggggcaaaagtctccccgcaggcagagcagggcctggatgggcccaagcagggacgggggcacagaacagcagccgcccagcctgcgtgggagctgagggccaccaagggcagctccagcctgtggggactagcagaggcaccacctctgtgaccagcgagttgtctgcacctgcatgcgcatgcaccagtgagtgtggcgagtctgaggtgtgctgggacctggcccgtgtaccagccagccctgatgggaaccagccccatcctgggtacccctggaaccccactgtgtgggagcacctgggtcctcagcaggcgtcttccgggcgtccgcccccagccccaggcctctgacccgtgtgtggtgtcttaacagcagccaggagcagggccatcgaagggacctacagacagaagaggctttagtgatttcgggaagttcagctccacgtgccccacatacccaagagtaaaacttggtcttggcctgtgggtgtgcagcccgtgggcgctggccaggcacacaagacggccgcctgggtcagtccagggggaggcagatgtggtgcaggggcccccctcctccatgagcccaggaacagctctgcatccaggcacccgccctgcacccagcacttttccttctcccaggactgctggctcgttctatgggattgaacacacaactccatggggaccgacgctggttctatccccctttcttacaagaccatccatggggatgtgggaggcggggacacacgctggttctatccccgtttcttacaagaccatccctcctgtgtcttggctcgtggatcggcttctaaggcctttgagtggcagcaggcggtacagcttatctgagtagaggtgaaggagagggccaggtccacctgggtggcccgaggcagtgtggagggccaggagaggagagcaccctccacccttgtctgagcagccctccagggtacggagacaggagttcagggtcagccctgccttggagcgcagggggcccccagcttggcacagctcctagaagaggagatgaaaaagcctggccttgggagtctggggatggagctttgctggggaggcagcgtggctgcaggatggcagctttttagaggacaccacggccagggacatccacccgggggaattctcaggggtcgcctgggcaagtcgcttagcctttctgagcctcagtgcctcagtttccccatccaaggatgggtgtgacaaccacctggcaggcgcctgtgtgtgagcccctgttccgctctaactcctctgctgttccttccccagccactgaggcggctcccagctgcgttggcgacatggccgacacccccagagatgccgggctcaagcaggcgcctgcatcacggaacgagaaggccccggtggacttcggctacgtggggattgactccatcctggagcagatgcgccggaaggccatgaagcagggcttcgagttcaacatcatggtggtcggtgagtcctcaccttgcatgccactcaaccaatgccggaaaccagcctcagcccccagggcggcccacaagcctttgggcttggtcttcccttctgtaaaatggggcagcaaccctgacctcaaggacggattgccagtgacattgcgtgtgcatgcatgcgcctgggaggagcccacagcctccagcggctcctcagaggggcctgtcctgcacatccagggcccctgagatgactttggggagcccaggccggcctggagcaggtcctgatgagtggtcgctgcctctgagcaatgacgtcagcttgtgcagagggttctgtggcagctgtcccctcactgttgctccagcctggccctccaggctccccaccgcaccccaccgcaccccggccagaggcttcccagcagctcagcttcagctctgccctggaattggggcctcgtggcttccacaccccctggtggccccggagagctggaggtcaccacgggaggtcgtcgatcagcacgacctgggcagggtgagggggccaggctggagtctacagtgggccgcctgttgtttccaaagccccccaggtcccattcaaacctcacagggaccctgtgaagggggcgtcccgttttccaggcagaagcgaggctcagggaaggctgccaaggttccttagctcacagggcagagaaccgcagccaccgttttgactcccagaactgtgttctgcccactccacggggtccagggaggggtctggggaagtgcccccgccaggtcacaccctaaacaaaggtgagcttgcggggtttctgcaaggtgtctgggcacctctcaggccgggcctgtttctctgacctttgccagccgtgcacgtccttcctgcccagctctgtggacgcaaacccacacctgccagcccgacacctttctttcctcttctgcactgatctgggccctggctcccctggggtcttggtgtcctctctgcttcctgtagcctcatgggacccggctgctcatggccctgctgtgctcacagctgcctggaagctggcagcctgcttcaagggagggcggaggtgtggggtcccctcctacggcccccaccctgttctgcctgttgtgggggacgtgcttgtaccctgaggattcagggctgcctcccgggaagatggctggagagaaagagaggggagaggcccaaaggcagtggccaggctgggactcatctctgtgggctacggaggggctgccctgctccctagccagggacagggtgagaaggacctgggaacctctgcgtcccagccatggcacaggccttcttccggagctttggccccaaggagagggagaggcagcccagcagccctcgccttccgtggctgccactgtgacagccttgccctctgggaatggtgcgcaggaggccacttcacctgtctgggcctcttcgccctttcaaccctgagaagaacagtggtcctgattccccacaaaatcactccctcccagggatgccgagtgaggaacaagacgtggggcagctctgctctcctccctcctccctcccatggcagctgtgcccacctgcagaggtgcaggcaaggtggaggggcacctgtttggaggtccacagaccccggggagaatcccagctttgtcctaactcagcggggtgaggcttgtgtgtcttcccctgggctcctcctctgtgagccttagcttcctcgtccataaaatgggatcatcccataaagtgagatcaagcgagctaggccccgggcagggtccccaacaggttgtggttgttcgagaatttgcagcagtggtgatggtggttgtggtgatgaggatgatgggggtggtaatgacggtgatgatgatggggtgatggtgctagtggagatgatggggatgatggtgatggtggtggtgatagtggtgggatggtagtggtgatgtgggtgatggtgattgtgatggtggtggtggtggtgatggaggtgatggtgatagtgatcatgagggtgatggggatggtggtggtggtgatggtgacagtggtgggatggtagtgatgatgtgggtgatggtgatggtggtgatggtggtggtggtgattgtggtggtggtggtgatgatggtggtgatgatggtgattgtggtgatggtgatggtggtaattgtgatggtggtggtggtgatggtggtgatgatggtgattgtggtgatggtggttatgatggtggtaattgtgatggtggtggtgatggtggtgatggggatgatgatggtgattgtgatgggggtggtggtggtgattgtgatggtggtgatgtgggtggtggtggtgattgtgatggtggtgatgtgggtggtggtggtgattgtgatggtggtggtggtggttgtgatggtggtgatgtgggtggtggtggtgattgtgatggtggtgatgtgggtggtggtggtgattgtgatggtggtggcgatggtggttgtgatggtggtgatgtgggtggtggtgattgtgatggttgtgattgtgatggtggtggtggtgatggtgatgatggtggtgattgtgatggtggtgatgggagtgatgctggtgattgtggtggtgaagggggtgatggtggtgattgtgatggtggtgaagggggtgatggtggtgattgtgatggtggtgaagggggtgatggtggtgattgtggtggtggtaatggtgatggtggtaaaggggtgatggtggtgattgtggtgatgtgggtggtggtggtgatgtgggtggtggtggtgattgtgatgggggtgatgatggtaatgtgggtgatggtgattgtggtggtggtggtgatggtgatgattgtgatggtggtgaagggggtgatggtggtgattgtgatggtggtgattgtgatggtgatgtgggtgatggtggtgttgatgggggtgatgatgttagtagtggtggtgatagtgatggggatgatggtggtgttgatggtgatagtggtgggatggtagtggtgatgtggttgatgatggtgctggtgctgatgattgtgatgacagtggtggtggtgatgagggtgacggaagtggtgatgatggcgggagtgatgggatgatggtaatagcagtgatggtattgtgatgatggtgctgatggggatggtggtgatgataagggtgatgatgatggtgatgataataataaaagtaacaataataaagggatacaccttgcagtatcccagttggcatctcctagatctaaggtgtcgtggctggaacattgacataactcctgacctgaggttggccaggacacagacctggtggacagagagagatggacgaggagtgtccgtccttgggctactaaacagttcaggccagggattcccagcaccagcctctgtcctcccaggagcccacacttttcctagaaaggtgttatcaaagtcagaacatcagtgtaatttagggtgttttttgtgttgtgtttttttgagacagggtctcattgttgcccaggctggagtgcagtggcatggtcttgactcactgcagcctccacatcctgggttcaagtgattctcgtgcctcaggcatgtgccaccatacctggctaatttttgtgttttttggtagagacagggtttcaccatgttggccaagctggtctcgaactcctgacctcaagtaatccaccctcctcagcctcccaaagtgctgggattacaggcgtgagccatctcgcctggccgatttttgtttttttaaaagacagggtctctgtcactctggagtggcaatgatcctagctcactgcagcctcgcactcctgggcttgagcaattctcctacttcagcctcctgcgtagctgggactataggtgctcgccactacacctagccaatgtttacattttgatgtagagacagggtctctctgtgttgcccaggctggtcttgaactcctgggctcaagcaatcctcctgcctcagcctcccaaagtgctgggactacaggcatgagccaccacacctggcctagggtattttttttggtgtgttgctagcgtagcccaaggcagctctgtgcagggtaaagcaatggggctccgagtctggaggggtgtgtgtgtgtgtgtgtgtgtgtgtgtgtgtgtgcgcgcacgcgcgcgcgtgttatatgtgatttgtttgtgtgtgttgtgagagttgtgtgtgaggtatgtgtaagaggtatgtttgaggtgagttgtgtgtgtgttgtgagttgtgcatgtgaagtgtgtgtgttgtgaggtgtgtgtatgaggtgtatgtgagttgtgtgtgttgtgttgcatatgaatgctacttcctcatcctcgtttgtctcagtcacctgtggactggctgtctgcacacacggtcactgtccctcgagtggcaccaccctgcaggccagcgccccctagcacatggccccacagaccccatgggacatgcgtgagcctgcctgatgctcacaccagctccacgggggaaggactgtttatcccattttgcagatcaggaaactgagacacggtgaggtcaggtgacttgcccaggccctggccggtcagggaggagcagtttgaacacctgggctttggttgcaaccaccctggtgaactgcaggaatcccggccacctggtgcaccctgggcagccctgggctcctccgccagcccggcctctgtcctgtccaaaatctgagccaccaggagacctcctgtccagaaagcacaaggggcacaagagatgccgactctcccaggcccggctcacctctcaggagaggactgtggcctgggttgtgctggcatcagagcccggctgtgtgggtttacacagtcactggacacccggctcgagggtgaagtcctcgggggctgcttggcagggatattgccgggaggtagcccaggcactgctgaatctcagactggagagcctcgtgcctgggtgggaggggccccatgtgcagaccctgctggtctctccggagagacccctgaccggcctcccatcctctccccagggcagagcggcttgggtaaatccaccttaatcaacaccctcttcaaatccaaaatcagccggaagtcggtgcagcccacctcagaggagcgcatccccaagaccatcgagatcaagtccatcacgcacggtcagtggccgggagtgggctgggggtgcaggacgcccctgccttcctggagcacaggggttgggggtcaagaccatcacacacagtcagtggccaggggcgggctgggggtgcaggactcctctgccttcctggagcacagagtggggggtcaagaccatcacacacagtcagtggccgggagtgggctggggatgcaggacgcccctgccttcctggagcacaggggttgggggtcaagaccatcacacacggtcagtggctggggatgggctggggatgtgggatacccatgccttcctggagcactggtgcggtgtgagggtgcccgagtcaggcaatcccaggtccccaagacggggactcgctgtgcccaccatccccagcatgttgagcatgttggggctctggctgtgatgggtcagtgtcccggacccctgtgggccccgtcacactgagctccccacagacaactgagttttccaccaaaagtctgacaggcaaggggctcccaggggaaccgtcaccggcctgtgccggagttggctgaggaaggccattaatttcccggtgtctccttggttgtcatcgctgcctacctggggttgccccggggtcagtcaggtgtggggtgtctgtgagggtcttccgtctcccctctgactctgcgtccgtggctctgtgcagatattgaggagaaaggcgtccggatgaagctgacagtgattgacacaccagggttcggggaccacatcaacaacgagaactggtgaggcccctccagggggaggagcactagcgggggcttcagggctccctggaccccacccagagtcagccctagaggtttcccggcccgcgggggtgcagggcccacctcctgggacctgacatgctgccaaagccgcacgtctcaggggcctgaaaattctggaccaaagcagaattacctggggaatcttgctgtccccaactcatcacctgaggccagcccggggaggctggtttgggaggccgagggtaaggctgtggcatctccgctcagcaagccagacctcccagggcatgcatttcattggaaggtggggtgttgggctctgagtcctgggaatgcacgacctgcttggggagggcatctcatgtgcctgctgactcgtccccatcccccacgcagctggcagcccatcatgaagttcatcaatgaccagtacgagaaatacctgcaggaggaggtcaacatcaaccgcaagaagcgcatcccggacacccgcgtccactgctgcctctacttcatccccgccaccggccactcgtacgtccctgcagtgtcggcgtcctcatgccgggtgccctgggttccctctgtcccctgggactgcaagacggtgctgtctgccctgctgctgggtgcagaggggctgagtcaggggccatggccgccagctatgaagttgggggtgtgccatgtctgcacctccaaagcctcacactgacccctatgcaagtgtcctgcccagcccccatccttcagctgcgtcttggggagctgagggtcaggcaggccctgggctgttctggagcctggtggtctgtgtcctgccttctcaggccaggctctggcaggtggagtgggagcccccagccaagcacccgtagcggtgactgaccttctcatccgggccctgcctcatgggaccccttagagggtttggtgcgttcttagacgggaagcacagagatcagtgctggccccttccagggctggacggggctgctgttggtgttggtgagagccctttcctcccgccggctctgtccgcacctgacgtcgcccctagagatcagcaagggcgggaggctgcatgtaccctggcaggtggactcttcatggcctcacggaccctctgtcctcagctccctgtgcaccccctgccagacacctgtggctcaccctgagccagggctgggaggaggaggaccagaggccagcaggagtggctggtggaggcagccgtgggtggcttgtctgcatgggtgggtggagaaggtccttcgcacctgctgtcccagatgtacttccctgggcggaggaagcccaggggtttggggaaaccatactctgtgggcaccaggtgcaggaaggagcctggctggtgggcagcgggcctcacccagagtctgtgggaaaacccaagccggagttttcgagcccaccctctggcatcatcctctgtgggccagcaggagtcaggggcagggggccagcccgctgtccatgggcctctcctgaactgaacatctgccctcccaggcagaacggctcacctgcggtcctgtggcagctgttccagctgctccaagctttgcctcagctgaggctgatggcaggaggcagaagcctctcctgatgccagctgggcaagccgagggcgggcgggcggtctgtggcacttctgccactccccagcactgaccctttggctgggactccagctaggcatgttgcctggtcccgcccaaggcgtccagtcccatggggcaggggcgggccttggccatctctgcttaaacttctgcccggagcgggcttctccccagccatgtgtgtgaccgatttattctcactgtgggaaaagctcggctccagaactggggaagatggtgccccagttccagggccctgccagcccctgccacccacagctttccccacatcagaccccaggctcactggggccaagcaggcaaggggagcagcccgcctggtgcaggggagcagcccgcctggtgcaggggcaccgcacactggtgctagcttctatttctcttgcctctcccctcccagccaaagccccacagcaagacggctgctgagccaacgacagcccttctgtgtggacatgtaggggtgtggttgggaccccagaactcatggacgagggtgcttggagctggccctggcccgcctggcctgtgcagtggtgtcacctgtgtctgggacacacccgtgtccttcctctgccccacactcacagcgtggccgactcggcccggggccctgtccttgccagcagggacccccgtgagccccgagccagcacctgagagtgtcgacacctgcttgggggtgggtgcccccccactgccccgctcccccagatgagcctcacgcacatccctctgcttcagcctcaggcccctggacatcgagtttatgaaacgcctgagcaaggtggtcaacatcgtccctgtcatcgccaaggcggacacactcaccctggaggagagggtccacttcaaacagcgggtagggttccatctctacttgccccagcccttctgtgcaacctggagacgctgcaggcctggcaggggccaccccgtctaaaggagtcacactgtcagggagaccgaaccgctggtcactctccccagcgggtggctggcctggtggtccctggcccaggtggctgctgggggccgtccctgagatggcctctccagctcccccatatctcaaaagcagctttgtgggagtgccaattctccagcagagtctctgaggggggttttggagaagacctggaccaggcagatggtgaatctctcttccagggagtgaggccgagcaggggccgtgcgacatggcccaccttgttttatgccccccctttttttttttgagaaagggtctggctcagttgccaaggttgcaatgtagtggcacaatcatggctcactgcagcctccacctcccaggctcagtccccgagtagctggaattacagacgcacaccaccatgtctggctaatttttgtatttttagtagagacgaggttttgccatgttgcccaggctggtctctaacccttgggctcaagggatcctcctgcctcagcctcccaaagtgctggggttacaggcatgagccacctcacctcgccctgcctggtttttattagatggaagagaagctgggccaggtgtggtggctcacgcctgtaatcccagcactttgggaggccgaggcgggcagatcacttgaggtcaggagtttgaggccaacatgatgaaaccccatctctactaaaaatacaaaaatattagtcgggcatggtggcgggcgcctgtagtcccagctacttgggaggctgaggcaggagaatctcttgaacccgggaggcggaggcttcagtgagccgagattgagccactgcactccagcctgggtgacagagcgagactccatctcaaaaaaaaaaaaaaaaaaaaaagtttcaggagggatggtctctgccaccttcttctccgccaccgtctgaggcccctgctgtgggatagggaggggcatccaagcaagagggcagccctgggctcttcctcctgacagggcagcacatcagagccacatggggtgcctttcaaaatgaaaccgaggtgcctgggctgcggcaccacatctgcctcggtgggtgtgggtggggcctgtaacctactccgtcctggggccaggtgtcagggaccttcccagcatgtgcaggggaagacagtccacacaaagtgggtgtgtctgccggaggctacacacgggctgtggtctgtgcctgggcaggcgagcagccgctcactgggatgtttctgttgcacgtacccatgtcgggctgctggcagggagctgagaggttactgcaggcggggcccctgctggaactggggactgtgacgagggttttttaggaagggtttcaggaggggaggtctcggtaaccctgagtactttcttggggctgtgatgagcaggagaagagaggtgggaggtgctcaggacgatgaccttaagcccctggggagttgcagcgtcgctcaggacagcaggtgcacctgcagctgcccctcttccctccaggaggcacaggagttggaggtgattggtgtcacagccccccagagcctgcccttgaacccgagcctggggcagcacacagtgtggaggtcatgtggcaaacaccagtgggtgggtagagcttgccacagggatgggcccatctctctccctccttatcccagatcaccgcagacctgctgtccaacggcatcgacgtgtacccccagaaggaatttgatgaggactcggaggaccggctggtgaacgagaagttccgggtgagtggatccactaggatgttgttcccaggggacccccagttcctgctgaagggtgggttgggggtttggaggaccttaagccatgaaattatattcttggggccagagggcactgagcccaggtgtctgtacccagtgctgtcaggctgaggctctcgtttttgggggaccccaggctcagggcagctcctcccgggggcccaggggagggaattgccttcccgcacatgtgtaaccaataccgtctgcccgttccccaggagatgatcccatttgctgtggtgggcagtgaccacgagtaccaggtcaacggcaagaggatccttgggaggaagaccaagtggggtaccatcgaaggtactcgccgcaggcgccggggctccagacagatgggaagacagtctcttctgctgacccagagcctgtgggccacgcctgagccagggactcgtggaacctcatccactgccttgccccacccagagggaggggtctccttgtccccattcaacccttgggaaagtgagagggcaagtggcctgtgcagatgcctccaccccagacctccccccgggcagggaaagattcagggagacaggagctgggatgggggccgccaagttctggatcctggtgcaggctctttcataggcacctgtgtggccctggacaaatcgcccaacctctctgggcctagaaaaggggtgggctgtagctctgtgagccagatggaccctcggccccttaccctgctgaagttcctgggaccctcacaccttagtctcttgagtggctgttgtaaccaattagcacaaacgaggggacttaaaacaacacaaacgtattttcacagttccagaggccagaggtccgaaatcaggggctgtttccttctgaggccctgaggaccagcctcatccatgccttcctccttctggtggcgcctggcattcctagttgtattgtaaaggcatcacatgctctaatctctgccccattgtcacagggccttcttccctgtgtctctgtcccgtccctcctcttcctttttttttttttttttttttgtttgagacggagtctcgttctgtcacccaggctggagtgcagtgttgcaatctcagctcactgcaacctctgcctcctgggttcaagtaattctcctgcctcagcctcccgagtatctgggattacagtcacgtaccacccacctgacttaatttttgtatttttagtagagacaggatttcgccatgttggccaggctggtcttaaactcctgacctcaggtgatctgcccaccttgcttggcctcccaaagtgctgggattacaggaatgagccaccgagcctgccctctttccttcttgtctttggacaaggatgcctgtctttggacttagggcctaccctaagtggatgatcccatttggagatccttaatgaatctataaagaaagacgttttccaagtaaggtcacaatcatgggttccaaggcctggaccttgaccatgtctttgaatggatgggagcccctggggggccacagttcaacccactcctggcggtgacaccccgggagggatgggcccgaacgtttccttccccttcctctctctgtcccttcatttctcattagaatggaagaggggaaggtgcagagggaaatgcagcaggaaaagccactttgttctgggagagcacttggctgaaaggcccagtagagcaggaagcacaagtctcttaatcttccagggcctcagttttcatcatccacaaagtgggtgcagtgtgccaagattttagtgagttgagagactgtcccaaagaccacagagctttttgggaagctgttgctctaaaaaaatggtcataatgacaattaccaggaggcatcagacactcctgtgccactggctagacatgggttatctcgtttcatgtccgaagctccccgcacccaccctccttgcagagttgaagaggtgctgtgagcagaaaacctgccaagggacccagaacgggaggcggctctagaatctacagctccagccctgcaccagactccctcgagatgggagttcatgcctggaggagggtgtggagaggcacacgggcctttcccctgtctgcactcctcccctaccaccacccctgccgggcccaccctgcgggagctgcccagctgggtgcagcctgggtgttttccagtatccgcctgtggtgtcaggctggcttgcctccccttggcccctctgcctgcagttcctctcttcctctctgcccaaagagttcttgctgtttaggaaactttttatgaaaggcaggtttgggagagttagggatggatgggcctgggacgggccggcggctttgctatgggcgtgcctctgctgcaccctggtggccaaccttgagtaccgcaggtggccggtgacagaaactgtcaggaaatgcacaagagagaggtccccgcacctctctgacctgtgcgttgttgagcaccactggctccagctgaggaagagtctggaacctgtcaggacagttgtgaggtggtggggcccactttccagcagtcttatatgaggaccctggaaatgtgccttcagcactgctgggtttttatatcaggggccccatgagttcatagctgacctgacacccggactagtaagggctgtgccttgttcttgcctcccacttggtgaacagcatcttgaggtatctttcccatccttagaaaccaccccaagtattgtcaatagaaatgtggggtgtaattgatcacgccatgaactcatttaatcctcatgtccctgagaggcgggtgacgttattatccacattttatggatgaggaaactgagggaatgagagtaacttgcccgagccagggagtggcgatcacacactccaactccagcctgagagccccattcttcctgccggctctcgctgcccgtcagtgttagatgagagtgctgctggtcagtctgcaggaggttctagtgtggacaccgccctacacagggccgtggcaggagggcctaggcaaaggcaaccggcatagcactgagagcacttgagggctgggcaaggtggaggccccggccctgcctgctggcctaccaagtaaaaactagacatttttaacttggggaaaagccatgtggctctgcgatggggcagcctggagccaggtgtatgggttctgcatcccgctccagccttatgcactgtggagctgagacagacacagttcttgcgttctctatgcctcattttcttttcttttctttttctttttctttttttttttttttgagacgaagtttcactcttttgcccaggctggagtgccgtggcgtgatcttggctcaccacaacctccacctcctgggttccagtgattctcctgcctcagcctcctgagtagctgggattacaggcgcctggtaccaggcctggctaatttttgtatttttaacagagacgagatttcatcatgttggccaggctggtctcgaactcctgacctcgtgatccacccacctcagcctcccaaagtgctgggattgcagacgtgagccgtggtgcccagcgtctacgccccattttcgtaagataatggggataacaaaggaatcacaagagacacttgcaggtgtgtgaagacgaagttcatcacatgggagggcaccgggtgtctttatttgccttccctgcccggctccccacctccagtgatgccgttcactgccctccttgttaaaaggccttctgttatataacagttacacatgccaggcaccgcgtgttcatataggagttacgaagcacagcaataaaatgaccactctgagatggccaccagctcgagcccgagggcacttgtgggtgcccgtggtctcctgcccagtctccctgagaagtggccactgtcccgagcttgggcttgtatgtattgtgtgaagtgcacatgtccctgagcaatgtttagcattgctgattcttgagcttgtgaatggtcgtccacagtacgtagcccctgtgtgtgtccctgtgtgtgtgtgctctgagcgcacacaaggtggatggggccgtgggggtaacaccctgtgggccacaggttttctttaaaatcccagctccgattcctgcttcatcccattcccagcagcccagccccctgcctgtcttcaggcccctgctgggacgtcctgctctccctggtcaccccagtggtgcgggggcccactgccctggcttctccactgtggcttccttccatgctcctatttggcctggtcactgtgccatctcccattagccaggaactttctggagagcaggagctgagctgtccaggagcaggagctggtgctggtcactccagtatcccccagactgagggcagtgccaggtgtcctatactcagctgcagagcaggtggttcccctgccctcctgcccatggggctgccctcagactctgcttttggcaccagcatttctgggcagggggagagaggtggggtccgggcagagtttctccactgggacattaaagcccctcctgtctcctctcctagttgaaaacaccacacactgtgagtttgcctacctgcgggaccttctcatcaggtgagagacagggtgcttgggtggggctgacggcttcacccctaagagggccctacagcgggtgggggcagtgggtgtggggccgaagccctgggcagagtgggtgccccctgccacctgcctgccctgccctcgggaagatcttggaagcccatcttctgaaaaagaaaacccactgggaaatgaagcaggcagtgaagatccttttcaacccctgcgaagttggctggatgggaaggctgagctttgatccactgtggtctggcccgttagagctgcccggtggccactaagggcccagtgaggcctcatgtgcaggccctgccggcagcgtggggcgtctccagctccgatcccactggcctctgacccctacccctttcacctggctgaggcttctccttgtttcccttgagtccaggcaaggaggggaagccctgatggagagggtgctgggtgggtggtccctggagtgtgggccctggcctgggcaggttcttcctcagcaagcagctggcatggatgatgggaatgttatcaagaggaggggcctccaggttggcgggggcaggggtggggggattccgggagccgttctgccattgtggggatactgggctttccaacctccctccagattattcctcctgagctgcagaggaatgaaaatccgagcccaggacttttttttcctggggacaagggcaacccagccctttgccccaggccacctgcctgccacaggccatagtcctggaggccggtggtcacccactgcttccaccctgccagcaccctggacaccggcctggagcaacaatgctccagccctgtccctctgagtctatgcactgtccctgggccctggacccagggccatagggtggacccagagggagacacatgcactggaatatgtgtgttctgaccgagtctgggcttaccagggggactgacccttcccccaaaacgtgtaccagatctggtccaacatggtgggcctgggggaccccatggggagccaagcagtcgggatggggagtgggggtgggggcaggcgggcctgagtccgaggcaggccgagcagggcccctgccccgctgcccccaccccgctgcgcccacctcactgacccgcccgccccccacccccacaggacgcacatgcagaacatcaaggacatcaccagcagcatccacttcgaggcgtaccgtgtgaagcgcctcaacgagggcagcagcgccatggccaacggcatggaggagaaggagccagaagccccggagatgtagacgccaccctgcccacccccgggatcctgcccccaagtcatttccgtccccccccaggccctcccaccaccccattttattttatatgattttctccatttgtcatcgttccccaccccttcgacatgctgccaggaaacaagggaaggggcctccctccgagtgagtcagtgatgaggccgcggcctccccgaggttgtggggaggctgcactggagccacaggcaggggtgagagcacccactgaattgacatgaccctctgtccccaggcctggctccccgagggctcagaagagcagcttcggtgtgcagatcatccgtctgtgtggggttctcagtgccggaggccttggggtgggggccaggcctcgcacttgcagaggagcccagtgggctgcacgctcccctccatccccatcggccctgtcccctggagtgtgtcagagcccaggggagaatgcagcccaccaggagcacctggaccccctgcccgccacatggtgtggccatcactcagcccctacccctgccctgctcctaagggtagaaaactccagggtcccctgccaccgactgcccagccactccaagccccctggcagctgcccctcctggagcagaaagtgcctttatctcagccatccgcagactgcttggccagatgcggggacaggctggaatgagggaggcgtcttcatctccctgccatccccctctcacgccacccccgcccccaccgggctgcaggtgctgctgatgcgctgggatctgattgaggataaaaaggaaggagagatgacccctaccccctcatcccccagttttgaaaaggtctaagcaagtgagtctggtggaggagctgagggagggagccatggaaggtgccagaaggaaggttggcgggggcacgtgtgggccgtggcttgggctggtcagagtggcgtgagctgcccggcgcctgccctgcccaagtgaccagggaagtgtgtgtgtgtccatgtgtatgcgtgtccgtctgtctgtctagtgtctgggtttggcccaagactgggctgtagttacattaatgcccagccagccacccctgccactcacccttcctggcccaggccttgctgactctctgagctggggaggtgggaggccaggcgagcctgactctgttgatctacccgtgcctgggcccctcccctcagagcccatggtaacgaacccctagaaaggagagaacgggcgtcaggggtgcacagtccacagctgaagagcaaggtttcgtggcagcacggcccggcccctcaccctctgtccccacgaggggacccatgggggctgtctttgcagggcacagatgaccaaagtcccttcctgcttcctgttacctgtcttgctcctggggagaaagaggggcctgatgagactccactcaggtgcacacatcaccaggtgcatctgcaggcaccgggctggctgcttgcagccaggagaaggtcagcgagaaggagtgtatgagtgtgagtgtgtgtgcatggaagttggggcactgggcgtctgactccctccccacccaagagaggaaggacccctcaccacccccactggtgagacagtttactttgccaacttgccatgtttttgccaaaaccaagattttgaaggaaatgagtggccagcgccagggcccaggccatgtggcctgcccagcctcaatgtcacttggtggcggggtggggtgggggtgggcagcagcatcccagccttgagatgcttcactttccttctctgtaaccagactttgaaaaattgttcgtttcatcaggctctgttcctcaatggccttttgctacgtgcctcccgagaaatttgtctttttgtataaatgacaaagtgttgaaaatgtatttcctgaaataaatgtttcaaatgcagaaacccagaaggctcctgagtgagaatgttttttctgcccctgaagtgcagttctttgggcctcgggacaggttggggtcagctgcaggtgggcaagaagcatgggcaagaaaaggtaggccgggcgcggtggctcacgcctgtaatcccagcactttgggagactgaggcagttggatcacaaggtgaggaatttgagaccagcctggccaatatggtgaaaccccgtttctactaaaaatacgaaaattagctgggcatggtggtgggcgcctgtagtcccagccactcgggaggctgaggcagaagaatcgcttgaaccccgggaggtagaggttgcagtgagccaagatcatgccactgcactccagcctgggcgacagagcaagatgccatctcaaaaaaaaaaaaaaaagaaaaggtaaggccaggtcagatctcgaattcagactcccaagatttgaaactaacaaactccctgagaacttataattccagagcactgtgaagagtgagaatagcatcaaggcgattgctggggcgttgtttaatctacctggggtaaaagttcccagggcttgagaagcactcagcggagatgactgaaaagtgaatggcagatctgaacgctttcattaaagtgggggatctgaagggcgtccacagggggcgctgtgagctgcttctagttagtgtatccttgaaaataactttttctgttttattttttgagacagggtcttgctctgtaacccaggttggagtgcggcggcacgatcacagctcactgcagcctctaccttccaggctcaagcgatcctcctgagtagctgggaccacaggtgtgcaccaccacacctggctaactttttcattttttgtcaagatgggatctcactatgttgcccaggctgatctcaaattcctggcctcaggtgatcctcctgccttggcctcccgaagtgctgggattataggcgtgagccactatgcctggctgacagtaagtttttcttttagaaatttatattagattgaactccagactggtcagtatttgacagttgttttatgccaacctaactcattccaagagaacttgattccaaatagattagaagtcagagccttggctgagtgagcttttctttgcaggtgagcttaggaagtaaggttcagggagctctggtccgtatgccctttgcgtgtgcagaagggcctcacccggatcccttctcccacgtgtattagtgccctgcagctgccttaacagatgaccatgcagcagggctgaaaacagcggaaatttattctcacagttctagaggccagaggtctgagatccaggtgtcccagggcctcgctccctccaaaggctctagaggaggttcctctctcctcccccagctcctgctggccacttcaccccatctctgcctccgtcttcacagccttctctctctctgtcctggagggtcaagagggccaagagggcactcttccaggactgagggcccaccttgattcagttcgatctcatttagatcctcaccttcatgacatctgcaaagacgctcttttgaaatcaggtcacattctaaggtctgaatggatgagaatttggtgaggtgggagacacggttggaccccctacatccccttccgccccgctgtttcaggacctccaggacaacatgggcagcagagtggtgggtgggaaagccctaatttgggactcggaaggtctgggttccagggtgactctgccaccaaaacttggggttgtctcagcctctctgggcaccccctggctcttctgccaggcacctgacttctgcatgttttggagaaagcagacaggttcctctctcaatgaactgatgggcgttggcccagtggagcctctgtgccatgggccggtgtctgccatgagcacaggcaggttgagagtcaggtcagcccctgtgggcggctgccagcctgcagcctgattccaaaagagggtctttgcagatgtcattaaggtaaggatctaaataatcactaaggcccttccagctgtgatggctttgtccatcccccatctgaagttcctggcagtccctctgccttgaagccctcttcctgcagactgaagtgtctccattttcacccccaatttccatccttgcacacagggagcctgtccagcggctgccctctttgggaccgaccaccctctccaagtcctggcctcagaactccagctcctccccacttggccagcatgatcctcccaggcgtctcgtgcctctaagccatacccagccagccccctgccccctacgccatggtcatctcattgaccagaccaaccccggtacccagccaccctgcacggcccatccagcgatgctggcagggagggcctcctgccacccaaccgagcaagtctcctgctgtagaaccagagtgaccactgttacaatttgcctgaaaatgagcgctttccaagcacacaggactttcagtgctaaaatcaggagagtcctgggcaaagtggacaagttggccactctgggtgggatccccgtgccaccccgccgcttctcctgcctctgggagccctggcctctacacttgttcaaccccagaggttctgaaggagctgcatggaccaggctgtccccaaggagagacccagggagagcaggaaggccccaggaacaggcaccattctcacactggctctgagctcctgcgtgggaagtggggaatctcgtgggggctgtggagaccttgtgtccctgcttcctctcctgctccaggcggcaaggtttgaagccaggaaagaaagtaaaatcaacaagcaggctttgggcttttccggacccagccttgtaggagtccctgcattctctggagctcaggggccaggtaaggatgctggcaggtgggctccactcagctccacctggatgcgcctgggagaaagccggatgggaacccagtgagcccactgggcgggggctgtgcttggcacctcctcttagatgtgcatgtcctttctcctattttattttattaatttttttgaggcagagtctcactctgttgcccaggctggagtgcagtggcgcaatctcggctcactgcaacctccgcctcccagattcaagtgattctcctgcctcagcctcccgagtagctgggattataggcacccaccaccacacccagctaatttttgtatttttagtagagacaggatttcaccatgttggccaggctggtcttgaactcctggtctcaagtgatctgccctcctcagcctcccaaagtgctgggattacaggcgtgagccaccgcgcctggccaactctctcacattttaaaacactactttctgctacaaaagtggcgtgtacaatgggaaatgtcacaaataaataccccaggaagacactcaaaagcccctgtgatgcccccccagccctggtcctggggtgtcggccttgggtctccctcctggtgcggcatcctttaaccactgcagttaactgggaggaaacgatccccatgcattgctctaaatcccgctggatctggttttgggggtgctgggctgctgcccaggagactggaaggggaggaaggtgtgtggcccctgagggcttccaaagcactctgtgctgtgaggatcccaccccgtgcgctcccagaaagtggccggtgtttttctgctccagcagggagcccaggtgaggttctctaggtaggtggaaaggtaggtggagcaggcttcaagagcagaacccagcagagcgccccggcttcctcccatcgccctcctactccctctcctcccctctcctcccctcccctcccatccttttggaagcaaggaggggagaggcttccaccgaagttgggcccagctcaggtgtcctgagtggtgggaatctgtgcagggcccaggcgcatttcctgcccgggagcaggaatgctttacagatgttggagctgcctcaaggcatggccaggaggggccggagaagcagaaccagctgcataggggatgctgggctggtgcctgcacatggaacagtcattgattaaaatgtcacttgtaaggtgcctaaatcttcgggtcctcctccttggagagtcccaggtaagctgcgttccctgggctgattccaggctgggccaggcggggctgggctgcagacctctggggactgcctacccaaccccacaccaccaggctccctgctcctcctgaaggccttggccttcagtaaaatgcaaaaagttaaatgctctgggttttctctgataatagaagcaatgcctgtccattgtagaatgttgggaaaatagagaagagcaagagcaacaacaggcacggaactccacccctgccggtcagcctgcctgtgcgtgggagttaaaacaaaacgcttctgcaaacatttggttttttttgtttttccaaaattaagctccgattgtgcatatcacttgataatcgaaattattttttgaaaaataattttaatagctatgcagtactccatcctgtcaacatatggaatgaaatgatgatttctaaattcttactcttgtcacctgggctgcagttggaggcctggtgggggtccgtgcggcgactggctgggccgtccctgtccctcctcccagatgacagaggtgcctggtgtttggcaaactcacttagaaggagcaagaagcaactgggatggctcagaagcccatggtggaatagtctgttgtaaacgaagagacaagaggaggccgaggactggtttccccttctccttcccgctcccagccctcccctctttcccatcgagtctctggtctctgccttcaggcccatggatgggcaaagcatctttcgagagcttgcctgccaaccctcagagtcacatacacgaaggtctcctggagctcagaaggtcaggcacaaagtcactccttgaccctatttattgaaatatccgtttttttgagcacttttcccgtgtagactcaacagggtctccctctgttgcccaggctggagtgcagtggtgcgatcatggctcactgcagacttgaactcctgagctcaagcaatcctgctgcctcagttctccgagtagctgggaccacatgtgtaagtcactaagcctggctaattaaaaaaaaaaaaaaaaaaaaaaaaagtaggccgggcacagtggctcatgcctatattcccagcactttgggaggccgaggcagatggatcacctgaggtcaggagttcgagaccagcctggccaacatggtgaaaccccgtctctactaaaaaaaatacaaaattagctgggcatggtggtgcacgcctgcaatcccaggtaatcccagctactcaggaggttgaggcaggagaatcacttgaacccagaaggtagagattttagtgagccaagatcacgctactgtactgcagcctgggcgacaagagcgaaactctgtctcaaaaaataaaaataaacaaattttaaaagtagaggtagggtctctctgtgttgctcaggctggtctcaaactcctggcctcaagtgatcctcccaccttggccttccaaagtgctgggactccaggcgtgagccactgcacctggctcagcttggcatttcttgaatttgggtccatgtgaaagagtccaggaggtcattcctcacagatcgcttattgaggaacccctcagaggtcagagtgggggtaggtgaggggagagaggggctgaagggagatgcaaggggcccctgggatggctggtgtcagtcccaggcccggggacacagccaggtggagagaacgtgcgatcggagcccaggggctgggctagaggcctgctttgctgtgtgtgcttgggcctggggttaacggttggagcctcagtgagctcatctgacagatggggatgaggaccagcatgtagtcatcattcaacactgtgggggagagaggcaagaaggagccccccggggcgggatgaattctgacccaagccaagagccaccgtggggccagcgcccacctgcaccaggttctatatccgccatcacattagctcccccgagagccctgaagggtgggccgcgcctgctccttttccgggtccactgagcggctctggagcccgggtttgtgtttagccgaggctctccccgctgcaccctctgccttctgctcccagcagggcgctgcagcatcgtccggttttaacagggtgaggcggctcccacagacatgtgatgcagaaagtcctcgacacccccagccagctctccgtgggtccagtccagggccctgccccacggcgcccactgctgcttccaggcaagcctcagattccactgggattcggagaagttgcagctgattcaatgctgagagcccatcagagaaaacatcttccttccctttcaaagaggacagctatgcataatcagaatacaaaggggtataaataattaaagcggcccagagtgagtggttcttgaaccatctgcctgatttacaaactaattactcagaggctggtcgctgcacgggagctgtgcacgctcctcaggacgctcaccgcctcctcttcgggcaccaggggtggcggcatcggcctgatcagccagtcctggcacgtagagcagtgccacggcctcctccatctccctgattaataacttcatcagagcccgggaccagaaggaaatgtaagtcctctgaaggaaacggccacacggaggagccagcagcagtctctcccagcagatgagctgggaggtggggacccagtctcaggcaggtgagtggagccccagattcaacccaagggatgacccattacaggggctcagcaggacctaaggatctttactctttatctaagggtccaaggcacactctccgcatacacccatcaccgtgtccctggagggagggaattggatctctgctctgattcttctgcaagaagaatcaccaggcgtggtggctcgcaactgtggtcccagccactcagagggctgagacaggaggatcacttgagcccaggagttcgaggctgcagtgagatatggccacaccactgcactccagcctgggcaacgggctgaccctgtccagtctacatgggaaaagtgctcaaaagacagacatttcaataatataataataatagttatattctgccctgcaggggagttgaggaatcctgcaggaagcccctctcctcatccagcccccatcccttgcccttccctactcctcttccttggagacttgcctggaccatcagtccctgcacagcagcctgggaatggggcagggtggggtcaggggacagaaagaccctgtcctagaacaatgaaccctgacatttgcttggcacagattctcatccttgtgttccctctgaagagggcacatcaggggctgctgctccacttcacagatgaggaaagagaggtcaagaaggttcaaagtcatgcagtggagagtgtggaggtgacctggactccagacttcctccttcgggagctttatgttcgggtgctgcttggggacagctcttcctatgcccccaccttctctggaaggcagccaggactgaagcacggccacctcacaacgcatcatgctgggacatgtagggtctcagagtgaggtatgtgtgtgcatgagtgtgtttatgagtgcgcatgtgagaattccgataaatgcacacaccctcacagcacaagatgtggggaaagacatagggtccaaaacagcccaccaggctgtgccttgtgtttgtgggtttagccctgagtggggaggtgttgagattagctgcactcttggatgagggtggagaggtgctgccactgccactgcatggcacccagctgtgagatgacccctctgttggcacaggcagagttacaaaatcagcattgcaaaactgaggaatgggaaccagggacatccatctacacacatcaaaatggttaaaggggaaaaacaaacacactgtccatttgcaaactgcctgcagttaagccctcagtgagtcaacccttcaaggtggcatcagcaggggagaaaatttcagctccaggctctctgggtttttcttatctccactgtactttcctaaagcctgatttcttttaggtaatgcgcatcctcctctctccatcatattttctttgtaagctcttagactgtgttcatttgcaaaggtcatcaaagggcagttttctctggagctggttttgaatcctggttcttctacttaccagctgagtgacttcagatgggtgacttaacctgggtccatgcctcagtttctccatctataaaatggtaacaacagtacccaattcataggattgttatgattaaatgagttagttcatgtgaggcacttacaatagtgtctagccaatgagtgtttcatagatgtgagccatcattatcaccattgacatcaccgccaccatcatcatcaccatcatcatcatcactgtaatcactatcaacattaccatcatcaccctcactatcattatcatcactatcaccatcaccatcactaccatcatcaccatgaccatcatcatcaccatctccatcatcatcatcattgttatcatcacatcatcagtatcatcactactatgatcgccatcattactaccatcatcccttcattaccatcatcaccatcattatcagcatcactatcatgatcatcaccatcaccatcatcaatatcattactactgtgatcaccatcaccaccaccattatcccatcattatcattttcactatcaccatcatcaccactaccatcattatcatctcatcaccatcatcaacaccatcaccatcatcatcattaccattaccatcatcaccgtcactattattaccattatcatcatcaccatcaccatgatcatcaccattaccatcatcaccatctccctcattatcatcattatcattatcatcacttcatcagtatcatcactactatgatcaccatcaccactaccatcatcccatcattatcaccatcatcccatcattatcatcatcaccatcaccatcatcagtatcatcactactgtgattaccattaccaccatcatcccatcattatttctgtcaccatcattatcaccacaaccatcatcatcaccatcatcatcaccaccatcaccatcatcatcaccaccatcattagcatcacgatcatcaccatcatcaccaccatcaccatcatctccatgaacatcaccatcaccaccattaccatcatcatcactactactaccttaccatccatgtaacgtacctactgccttacctagcaccatcaatgtcaccataattattatcatcaccatcaccatcatcatcacgattatcaccacaaccatcaatatcatcgtcattttctccatcatcaccatcaacaacatcctgaaactgaaataaagaaaaaggccctgctgtggcctcatcttgctcctctgctctggaatcagaaggagtaaaaaccagccaagtggagggcagagctgacagcaaaggagaagctgggctgtttgctgcccaggcctggctggcacccctcctcctgggacgtagcaactttctgagcatgtcctcagtacgaggcttccctgcactgcttctccctgaatgttcacaatagtcccacggggcaggtgccatcacggtgaagttgaggtacagagaggtcaaggagcttggccagggtgcacagctggtgagggactgagtcaggatgtaaaacactgtctgatctgtggtccagtggcatccactgcacttcactgcccacagtaggggtgggggtgggggtggcaggctccctgttgcctcagactgaagaagtgctcaaggctggctctgtgtactgggacctctctcctgggccatgaaccacagcatctatttttaaatgtggagcacctattcacggaggcagcaccatgctgggccctggaggaacaaagcaggcaaataagtcaggactctgaacctgtgggcggccggttgggtggggaggacagacatgtacacagagcatcataatacaatgaagccagtgccatgacagaggtacatgggggccaccggggaaggttcccagaggaggggcacctacccttgttggcagggccagtgctgagtgtcagttacgccctttatattctttataaattacacaatcttagatttttttttttttgagacagagtctcactctgttgtccaggctggagtgcaatggcgcaatctcacctcactgtaacctccgcctcctgggttcaagcattctcctgccttggcctcctgggtagctgggattacaggcacatgccaccccgcctggctaatttttgtagtttttagtagagatggggtttcaccatgttggtctggtcttgaactcctgacctcgtgatccacccaccttggcctcccaaagtgctgggattacaggtgtgagccaccgtgccctgcctcagatacttctttatagtagtgtgaaaatggactaatacagtatgcattcattgagtttcttggatctattggctgatctttttagattttggaaaattctcaacaactattcctcaaatatttactctgccttatgctccttttcttctctttctggtgctccaatttcatgtatgttaatatttttccacagttcttcaacactctgttcttttttaaatttttattttgttaattatttttctgtttgaattttagtttggataatttctattgactagtctttaagatcctttcagttttattgatcttttcttctactgtgttcaatctgctgttaaacccatcaaacaaactctttgtatctaatattacagttttcatctctagaatttccatttggttattttatagtttccatttctgtgctgaaatttcccatctgttcacacatgctgtctacctttcccactagatcttttaacatctctattttagtttatttaaggtccttgtctaataattccaacactcagtcatctgtgggtctacttctattggtaatttttcccctgattattagtctcattgccctgcttctttgcatgtcttgcaatttttttagtctgaaatgtagtatattttttaaaaagtagtgcctatagtaagtatatgtctcctggaaaaagaatgtacccttcttctattgggccattagtgtgagggactgagtcaatctaatatgcagttgacttggatctgggctttagtgaagcttcagttaaagtcacttaaccactcacttcaaatgttttgaaagtaggatcaggtctttcccttaagtaagtgtttgagagagaagaggacagtatgaaaaacgtaatgtgtgcctgtattagaaaggtcagagggctttgaggatgtaaacatggtgtataaaggtgagtgttgttaaacaggatattgcaacagtgcagagatgggtggtaactttcagaggatgaaagatcttattcttgaagctttcagctgggaatggtaaaaataataacagatactatcctgatgaagggcattctgggcctgaacccaatcacttcaaagaccctgaaagaattctcaggattccatagcaattggccataggccactgctgcttccacatatgaaaaaaatgctaacatcccagtcctacttccaaaccccagcacaggctgtattgccccccagggtaatttaacaccagaaaacaaaaacttcattggtcctggtccagatttctgtgtcctggcctcgcccataaagggggctcccattagctaacctgctcagctccccgccacacttcccacagagctttctagcttttgtcagctcaaggcagcccttgaaaactgtagaatctgagggggtgtgtatctaataaagttggagctctgtaatttagcaattactgtaacccacacttgtaatttagggggtttcttgtaattctttgtactctttctttttgaaaaaatatgcagccttaatagcttcctctttaatgctccaaaggccgatatttgccactccccatcccctgtcagctgcagagcacaaagaagtgtgcagatcgtgttgaggctgcttttcaggtattagaaagtttaatttaatgctcagcatctccgaaaggaaactgaacttgctccttgtaatcgtgcatgtcttcaaagctctgaattcctcttctaggttggtcatcagtatggattaaaatctgctgagaggtgtaatctacccacctttctacattctactattaggccagtctcctcactgcttcctgaatgtgctagtgttaattttgctcatctgtctttatttgtgcagttacctatttgttcatttaagatttttttttctttttttgagaacctctatgtgctagactctaggctcactaccaggaatctaagtcataaaggacaggacaacctctgtccaggagtttgtagtctggaaagacagatgactctatcataactacactcaagatattaggtgtgatgacagagctggcatagagggtgatggaaaccagggggtggcacctaactcagactgagctgtgagaagtagctatttggaagccaggctatgatggtaaaaagaggcgagagaggcaaagcgtgggaaagaatggtccacaaagcacacagagacttgtgctggaatgcttctattcataaaagctggatttaaaatagagacaaaccggaaaacacacagatgttcatcaatagaagaattttgatatatgtatacaatggaatttgacttagcaattaaaaatgaactactggtacatgtaacaacatgcttcattctttaaaatgttatgttgaacagaaaagcctattgcaaagggcacatagtatttaattccacggagaatgaaatgcaagaagaggcaaaactggccaggtgcagtggctcatgcctgtaatcccagcattttgagaggccgaggcgggtggatcacttgaggtcaggagttcaagaccagcctggccaacatggtaaaaccccgtctctactaaaaatacaaaaattagccaggtgtggtagtacgtgcctgtaatcccagctactcaggaggctgaggcaggaggattgctcaaacccaggagatgggggttgcagcaagctgcgactgtgccattgcactcccccggtctgggcaacagagcaagactccgtctcaaaataaataaataaataaataaataaataaataaataaataaataaataatcaaaaaaagaagaggtaaaattaatccatagtgataaaaaccagaactctggttgcctatggggaggtggagactcaatgtgaatggcctgggatgatgtaaataggctattggttttctggtagcatgtatttacacatttaccaactcattgaattttacacttaagatctgtgtatttcactgcaggcaaattttgcctcgataaaaactaaccagtaaaagaagaaaaaagaatctgaatgtctctatctttttacagagggttttaatccattcgcattatttgtgagtattgagattgatgttaggacttatttctgctaacttgctttatttttaaaactatagttaacatactttcttgttatttcttattttccttaacaataataaagttttgaattcacgtctaaattcaactgtgactgtatcctattattttctaaataatctacaataggttttgatttctttgttgacttaatcattattaaaagaaggttttaaaatttccaaaccactgagtgtttctgttaggctttgttaaaacttgaccattaatttctgtttttcctattttaaacaattgtggttaggaaatgtagactgtgctctcactgctttatagaacaagacagaaaacagactgttcttggattaacagatgtgttgttttggtttattcagatggcctcaaaatgtcctctgttggtgagaggatttttaaaaatcgttacatataagccttttaatatcaaggtatattagtccaattttaatactgctatgaagaaatacccaaaactgggtaatttagaaagacaaagaggtttaatggactcacagttccacgtggctggggagacctcacaatcatggaagaaggcaaaggaggagcaaacgcacatctcacatggcagcaggcaagatagtgtgtgcagatatcatgatatctgatatcctgagacttactatcatgagaacagcacaggaatatcccacccccatgattcaattacctcccaccgggtccctcccacaacacgtggggattatgggagctacaattcaagatgagatttgggtggggacacagccaaaccacatcacaaggccagcgacttgcgtgtaatgggtatttaattgtcaaaaattcatacagccaaataacatttgctactaaaagcttgactctgttttgtgttcctggaccacatgaacagggtgtatttgcctctcctcctggaaggagcttggtgcctgggtcccatgtatctttaaatacatattgcttgcttcagcaagcaaagacagcccctaccaccctactttgccactgtcagactaaggcaaatataatgatctcttatttgtgtccttgttccttgtgtggaaaacccaaatgcagcaagaatgaaaagtgttaaaggattttatgtgttcaatgtatttaggccatgtcagcagtaatacaaaatcaagtgtatcttttttaaaaatagatatatttaatgagggaaaaaaatccataaaaccactatcaggtattagagccagatgttatgattctgactttcagacagaccctaaggcctacatctcaggttctgcccagtaattttcattttttgacctggatctatacatttatcaaattttagctgtgtacagatagaaaagaaagtggttagaaataaaaatgctggctgggcacagtggctcaggcctgtaaccccagcactttgggaggccaaggtgggtggatcacctgaggtcgggagttcgagaccagcctgaccaacatggagaaacaccatctctaccaaaaatacaaaattagcctggcgtggtggtgcatgtctgtaatcccagctacttgggagactgaggcaggagaattgcttgaactcgggacgtggaggttgcagtgagctgagatcgtgccactgcactccagcctgggtaacaagagcaaaactccctctaaaaaaaaagaagaagaaagagaaagacaaagaaagaagacaaagaaagaaagaaagaagctgtgattcaacgtataatcagttttgtaactgttccattgatgtttgaaaagatggcatattatagctattacagcagtaggatgtaagtgtaaaatctttctatccatctatctatatattagttacctattgctgcattcagcacataacagccaaaacaacaaacatttctttgttttttcttaacttttattttaggttcagggttatgtgtgcaggtttgttatgtaagtaaactcatgtcatggggggttgtcgtacagattatttcatcacccaggtactaagcctactgcccaatagtcacttttttctgctcctctccctcctcccacccttcatcctcaagtaggttccagtgtctgctattcccctctttgtgtccatgagttctcatcatttagctcccactaataagtgacaacaagaggtatttggttttctgttcctacattagtttgctaaggataatggcctccagctccattcatgctcccacaaaagacacgatcgcattctttttttatggctgcatagcattccatggtgtatctgtaccacattttcttcatccaatctgtcattgatgaacatttaggttgactccacgtctctgctactgtgaatagtgctgcaatgaacatttgcatgcgtgcgtctttagggtacaatgatttatattcctttgggtatataccttgtaatgggattgctgggttgaatggtagttctgtttttagccctttgaggaatcaccacactgctttccacaatggttgcattaatttacactcccaccaacagtgtctaagtgttcccttttctctgcagcctcacgagcatcagctgtttttcgactttttagtaacagccattctaactggtgtaagatggtatctcattgcggttttgattaacaacagacatttctaatctcacagttgatgtgggtcaggagctcagaagcagcttaactggatggctctgactcagcgtctctcatgaggtggtcgaggtggaggctggggctgcagtcatccgaagatttgactggtgcaggaagatctgcttccaaggtgactcatatgtgtggctgttggcaggaggcttcagtccttgccatgtgagcctctcttcacatcataactggcttcttcaagaatgaatgatccaagagaaagaaagaaagagaagctgcagtgtcttttataacctaaccttggaagtgacataccatcattcctgcatattctattggttacacagaccaaccccagtacagcgtgggagcagactacacaggtgcgtgaatactaagaggtgaaggtcactggggatcatcctggaggccggctatcacaacctacctttttatctgtttatagatacaggtagaaagttgttcaaccttatgaattatattattaaaataattggtctatattttgtccacttgactatcaaagactgagagtggctgtcactgttgtgctgcagaggtaatgctgttttgcattttgaccatttcaaaatatcttttgagacaaattatattttatgttatgttttcattgtggattctgcccttaatataaaataactccattcattttaatatcttctgcttttgattctgtgatgcttaataagatttttatctctgttttctgttttcttgcatttacctaataatttttgctggcgttttaatttttaagctctaatattttaaaattataaattgataatttataattgtgtatattatggggtaaagatttctatacaaaataattcatgaatgccatgtggaataattaaatcatgttagttaatataccagtcacttcaaatacttaatattttttgtggtgagcacatttaaaatttactctcttagcaatgttgaaatgtagaatatgccattattaactatattcaccatgctattcaatagatctcaaaaagccctcccccatatcctttctgtctaactgagattttgtaccctttagctatcattgcctcatttgcgtatctctttaatactgaatttctttcgggtgtgtctcttgtaaacaacatatgcttctatctgatttttaataagaaaatttaaataactcatttttattgttataacaagtatatatgtatatgtggggggaaatatatatatatattttttctttttttcttttttttttttttgagacagtctcaccctgttacctaggttggagcacagtggtgtgatcttggctcactgcagccttgacctcttgagctgaagtgattctcccacctctgcatcctgagtagctgggactacaggcgtgggtcaccacacctggccaaatttgtgtatttgtagacacgaggttttgccatgttgctagagactggtcttgactcctgggctcaaatgatctgaccacctcagcctcccaaagtgctgggattacaggtgtgagccaccgtgcctggcccaacttgtcattttaacagcatctaagttctttagttctttgaacatatttctagtacctactttaaaatctttgctaaatccaacatcagggctcactcagagaatccatttctattgactgctttttttttttttttccagatatgggttacatgtccctgtttattttcatatctcatagtttttggtcaaaaactagacattttaaatattataatgcagtagctctggattccatttatttttatttatttttttgagacagggtttcacttttctgcccaggctggggtgcaatggcatgatctcggctcactgcaacctccacctcctgggcttaagcaattctccagcctcagcctcccaagtagctgggactacaggtgttcaccaccatgcccagccatttttttttgtatttttagtagagatggagtttccctatgttggccaggctggtcttgatctcctgacctcaagtgatccatatacctcagcctcccaaagtgttgggattataagtgtgagccactgcgcctggcctggattccatttatttttctgagttttttttttttcctttcctggacttacactgggggatgtcccccttgtggtatgtgtctgctgatagctttgctcagattttttatctttcagcctgccttcccaggaattatccttgagtctgcattgcctagtgatcagccaataattcaggcacagtttgtgcccaaacgcctaggccctacctaagccttctttcctcgctgctctgtgtgtgtgtggatttgggagtgcatttgaagccgagtatcccttggcctccactctgtgctgggctggttcaggcccgccccgaggaggctcatagtttcccagtcagcgcggtgtttgtggaaagtttgtttcagcctttccagtactctcttattcctaggttctccctgtgaaatttcttttttttctttttttctttttttttttgagatggagtcttgctctgtcgcccaggctggagtgcagtggccctacctcggctcactgccagctccgcctcccgggttcaagtgattctcctgcctcagcctcctgagtagctgggattacaggtgcacgccaccatgcccagctaatttttgtttgtttttagtagagatgggttttcaccatgttggccaagctggtctcaaactcctgaccttgtgatccgcccacctcggccccccaaagtgctgggattacaggcgtgagccaccgtgcctagccatgaaattcctgactggtttgctgcttaccccaaacttaccataactgttcttgctgatccagcttggggaggatagagcatccctaaacaagaagaccacagacctttactactcttgccaaaagctctgcagcttctcaataatggaagcttctcaactcattgtctgtctttggttgactagcccccaaaggtggttgatttttaattttgtccatttcgtacttgtttttttgtggagagaattcaccaaccttttcatgccaacatagtcagaagtgcctccaacagattaaggttaaaaaccagatgactggtgactggacaatctcaacacacatggaaaaggtacaggattaaaatttaatggtcacttgtgaataataataataacttcatctagtaatcatggttgtctaccaaaaactcatagcaagcattgtacttagtgatgaaatgataaagactgtctctttaaagtcagaaacaagaccaggaagcacactctgggtgttccaagccaaaagggctttttttttttttttgacagggtctcactctgtcacccaggctggaatgcagtggtgggatcttggctcactgccgcttctgcctcctggattcaattgattcttgtgcctcagcctcccaagtagctgggattacaggtgtgcaccaccacacctcactaattgttgtattttttactagagacacggtttcaccatgttggccaggctggttttgaactcctggcctcaagtgatccacctgcctcggcctcccaaagtgttgggattacaggtgcgagtcaccatgcctggcctcaaaagggatttaatgtaagaaattaggtgctttcagagttaatggaaagctaaaacagaagacattagggtccatcactagcttcagggtcacggcactgtggctatgagagggagcccctaaaatgactgctagccatgcaacaggaggcagccacctgcgtagacagggatgggtgcctggtgaaacccaccttcaagccaaaaacagcctgaaggctgaaagactggaccgctggtgccggatgaaaccgagacgcagagtgagaacttctgttcctgtttgcccgcccttccccgattgattctttctgaataatgcctttcaaccaatcaaatattgcctttttcaatactacctacggcctgccctcccagcctctgagcccataacaagccctggactgagccatattaggggaactttcctgctttcgggtaaggggaccacctccatgtccccacctttgggtaaggggactacccccacatccccgccttccggtaagggggccaccctccgtcccctctctgcggaaagctgtttcatcactcgctaaaactccctgccttgctcactctgagattgtcagagcatcctcattctttttgagcgtgggacaagaactcgggaactagtgcacaagccagactcggcccagggtggagcatcgtcagccggaggtccctggcttccaaagtgaccgagaagaaaatcctgactagcatcatcactgcttcccacctcccggtcccaggatctgcagtgggcaggctggagatcaaggagagccgatgatggaattccagcctgaatccaaaggcctgagaaccaggacagcccacagtgttaagtttgagtctgaaaactggcagtctcaagacacaggagagccaatgtcagttcaggtctgaaggtgggacgaagctgttgtccccgtgaagctggagactagacagtgagaggggatcaggagctagatatgctggggctcgctcaggaaccacccccgctgcaggaaagagttaggactgctgtgtccctgcaccttctaaatactgcattcagtgtatctatgggtagaccctaaattacagctgtgtgaatggaaaataaatctcaggacccccaaatcaccaagccaaaggggaaagtcaagctgggaactgcagcttggcaaacctgcctcccattctattcctaaagaagatagttacaaaggtgaaaaagctaggccgggtgcggtggctcacgcctgtaatcccagcactttgggaggccgaggcaggtggatcacaaggtcaggagatcgagaccatcctggctaacacggtgaaaacccgtccctactaaaaaatacaaaaaatgagccgggcgtggtggcaggcacctgtagtcccagctacttgggaggctgaggcaggagaatggcatgaacccgggaggcagagcttgcagtgagccgagatccggccactgcactccagcctgggcaacagagcgagactccacctcaaaaaaaaaaaaaaaaaaaaagctacagacctccctcacaatttgcccacaaggaaattccttgtggacaaaggacagataaaactcaaagtcatccctctgctcacctgagaccaatgcagatctgatggcttcctctgccctactgtttcactgagccagaccaaggcatgagtgactattactgtcaattgtgtattcagtgaaaggctaatcagaaactcaaaagaatgcaaccattatctacctatgacctgaaaggcgcctccccgcttcgagctgtcccatctttccggaccaaaccaatgtaccgcttacatatatatatatacacatatatatatatatatatatatacacatatatatatatatatatatacacacatatatatatatatatacacacatatatatatatatacacatatatatatatacatacatatatatatatatacacatacatatatatatatatacacatatataaaatttttttttttttttgagacagagtcttgctctgtcgcccaggctggagtgcagtggcccgatctcagcttactgcaagctccgcctcccgtgttcacgccattctcctgcctcagcctccgagtagctgggactacaggcgcctgccccgacgcccagctaatttttttgtatttttagtagagacagggtttcaccatgttaaccaggatggtctcgatctcctgacctcatgatccgcctgccttggcctcccaaagtgctgggattacaggcgtgagccaccatgaccgacccagcttacatatattgattgatgtctcatgtctccctaagatgtataaaaccaagctgtgccccaaccaccttgggcacatatcgtcaggacctcctgaggctgtgtcacaggcaggtcctcaaccttggcaaaacaaactttctaaattaattgagacttatctcagatgctttttggtttacagctggtatcctgtaaaatcaaggtggtctgggaaatgtagcatttagccttctagctcccatgctacaaggtggtggaactggatgctgaatgccatagagagtatctagcacagacatatagaaaaattctcttctggtctttcaagataaaaacaggatctattttatttttgtttatttttaatttttttttgtttttttcttttgagatggagtctcgctttgtcacccaggctagagtgcagtggcgcgatctcagctcactgcaagctccacctcctgggttcaagcgattcttctgtctcagtctcccaagtagctgggactacaggcgcccgccactacacctggctaattttcgtatttttagtagagacggggttttgccatgttgtccaggctggtctcgaactcctgacctcaggtgacccacccacctcagccttccaaagtgctgggatcacaggcgagagccactgctcccagccaggatctactttagctccaaacccatcttgaatttatgtccccagcccagatgaagcaggggaaatcgctggtgaatattcgcattagtcagggttctcccctctgtctatatctctgcctctcctgttggtcctgtttatataaagagatctattattaggaatcggctcacgtgatcatggagattggaaagtcccgtgatctgcagtgggcaagctggagaccaggaagagctgatggtggagttccagtctgaatccaaaggcctgagaaccaggacagcccatggtatacgttctagtctgaaagctggcagtctcgggacacaggagagccaatgtcaggtcaagtctgaaggcaggacaaagctgttgttccagcttgaagaccatcagggaagagaaattcattcttgcttggaggagggtcagccttttgttctgtgcaggccttcaactgatgatgaggaccccctccacactagggaggacaaactgctttattctgtccactgatttaaatgttaatctcagcctggctcggtggctcatgccagtaatcccagcactttgggaggcctaggtgggaagatcacctgaggtcaggagttccaaaccagcctcgccaacatggtgaaaccgtgtctctactaaaaacacacagaaaaattagctgggtgtggtgccacacacctctaatcccagctacccaggaggctgaggcaggaggatcacctgagcccaggaggtcgagactgcagtgaaccatgatcacaccattgcactccagcctgggtgacagagcaagactctgtcataaataaatgttaatctcacccaaaacaccctcacagaaacactctaatgtttgaccaaatttctgggcaccccgtggcccaatccggttgacacataaaattaacgatcacagcatttgtgaaatgtctgacattttatgactggtgcttttgagatgttctatatctggcagacagaatccctaataaacaacaccttacagctaaggagcatgtttgactctggcgttctgactgatgttcacatcaaggagagaaaagaacgcgaacacttctcgaagaggagggggcatgatgggagcctccttcctctgctcctccctctcactcccctcccccagcctggtgactctggcttctacctgcagccccatacctgtctcactgactgatggttgtggctttagagccaaagttcctgagcctctgagcctatccagccacatcaaaagccactcctgctgctggcttccagctctagttagttgctcacactccttcccaaacctcatgtcttgtggactttttgctccctggccttccaggatcggtcctgccttcacatggacctgattctctgctgcctggacccacacctcatgtgtttagggatctccagatgacccatagctcatgtcactgtacctgccaatcatcttctcatttgaaccagaccctgcctggtggcacccaggaatctaccccctaccctggggacaggtctccagtccgggtgagaaaggtgctatgtatctagggctcatcccgcttcacgctgaaggtgacggggggtggcagtgtgtccggaattggtgggttcttggtctcacgaacttaaagaatgaagccaccgaccctcgcagtgagtgttacaattcttaaaggtggtgtgtctggagtttgttccttctgatgtttggacatgtttggagtttcctccttctggtgggttcatggtctctctggcttcaggagtgaaggtgcagaccttcaccgtgtgttacagctcttaaggcggcgcctctggagttgatccttcctcccgtcaggagttattcgttccattcctcctggtgggttcatggtctcggtggcatcagtagaccttcacagtgagtgttacagctcataaaggcaatgcggacccaaagaatgaacatttattgtaaagagcaaaacaacaaagcttccacagctcagaagagaaccccagcaagttgcccctgctgattcgggcagcctgcttttattcccttatctggccccacccacatcctgctgattggtccattttacagcaagctgattggtccgttttacagagaactgattggtctgttttgacagggtgctgactggcacgtttacaaacctttagctagacacaaaagttctccaagtccccactagattagctacacacagagcactgactggtgcatttacaaaccttgagctagacacagggtactgattggtgtgtttacaaaccttgggctagacacagaatgctgattggtgtacttacaatcctatagctagacataaaagttctccaagtccccacccgcctcaggagcctagctggcttcacctagtggattctgtgccagggccgcgtcaggcgcctgcactcctcaacccttgggcggtcatgggactgggcgctgcccagcagggggcagcccccgtcgaggaagctcgggccaagcggaagcccaccaggagggggtggggggtggggctcgggcagggcgggctgcaggtcccaagccctgcctcatggggaggcagctgaggcccggcgagaattccagcatggctcgggcgggccggcagtgctgggggacccggcgcccccgacccccccagctgctggcccgggtgctaagaccctcactgcctggagccgctggcaatagccagcggatcagagtgtggggcccgccaagaaatcgccctggcccggggagccccctgggcagccccggttcccgcccgcgcctctccctccacaactctccctcaacacctccctctccactcctccccgcaagcagagggagccggctccaccctcggccagcccagagaggggctcccacagtgcagtggcgggctgaagggctcctcaagggcagccagagtgggtgccgaggccaaggagacaccgagagtgagcgagggctgccagcacactgtcacctctcagcagcatacaagggccacctgggaagtggccactgaatctgggctcaggctataggccccctctcttgatcttcaagttcagtctcccatttttccttgtcatttttgttttgccagctttcagtggcagcagcccctccccctggggctcagagctggagagggagttttaagtggtttctgcaaaatattttggaggagaatgatctgcctttagtagtcaaggactcttcttgcaacactcaggctctgttttatggacagaaagagtccaggaggctctctgagccacacaaggccctttgcaaccttcctgggctcgggctgcgagcagccattttggaacatgtgaaacggattttaaattccctctttgcagtttgagaagatggcggcctgaaccggagtccttcttcccctcctccctctccgctgctgcaatgcccaggccccccgcaacgttcctcgtctgtaatggtgccagaggctttaaatcttgcagaagccacatctgctgcctgcaggtaaacctccctggctgagcccactgcgcacgcctccacgttctggagccagaaacaatgagaagcacaattccggcagcatctctcctcccggtcatttgcatagcacaacctctccctccaccccctcctgtctcccacgtggatcttcatgtaattaattaatatcgcgttcatcagagcttaattcatgttcttgtaatatacaaggattaaaaaaaaatcctaccaagagagcagtaataggctccggcttttctggtctgggagcaaatataatgagcctccatgaaaatattgaatcgcttcccgcagtctccacacctcagagcactggcatgtttactgtggtaagccacccctgtgtttagaaacatcacggcctgctttcctacaggggtagccatgctgggggcctctctggagcctctcctaggagtgcattcagcagggcagaggctcggagctcttcccgggggtacattcagcagtggcagaagctcagcagatgatggggttctgtgtgggtgagagctgagggttgggtttcctgcacaatgccaagagtgccaagagtggcattgcaagttactccttccctcccagagcccatttatttttaagccaccctctcccctccactacagtgtgatggcttctccatgctaatcgccctatagaacaaggagaaaaggaaaggtgggcccttcacggtatatattttgctctttgattggaacgaaatgaactcagtgtaacgtccaggctgttgtgggggctgggttgtttctggacagaaagtcccatctgtgtccagggggccgcgtctgagttcggggcatccacactggcacgctgttttgctcggagctgggacataacacgtgggctgtgtgagcgctcttgggggctggaaacccaaggggccgatcaagggttcttgattcaaccaaacctcccccttgccatcctccatgcagaacgcgtccctggggccttcaccctgtcgtgaacaaagcacgactattttgtaaagggaagatcaaagagccagaagtcgcggatgagtgtgtggcaggtggggactcagagtgacagtggccatgcggtgtgtcccgtggtcgccccagaggcggatgggccaggccgctgcacataccctgggaggaggcaggtggggagggaacccgaggaccctgcctatgttcacccctctgttcctctctgggacccactatggctggaagggactttttccttctccccccacccctcccctcctcaccttccctccccctgctttttaatttcttcccttttgcaaggctttttgtccagctggggctgggaagaagatgcccccgaccccctctcgtggtcgccagggtaggggtgggaggaatctggaagccacgtgcgatgctcggagctgcgtcctctgtcctggggcgtgggtccgcgagcgccgcgcagcctcccggaccgccctgagctgctgcgcccggcgctgctcctccttccccagctccgcgccttcccctcgcgatccccctcctgcctcttcggtcctggaagcgtcccaagatggggtgggggcatggagggagagaggggaggagggagctgcccgggggcagtgccgccaggaagtgggacggggactctggcgcccctccaggctgctgcgcgcgggctggggaccgtgcaccgctttgcgcgccagacgatgcatcttctggaacggcagctgaggcaatgcggggtgtgaagtggcggcgggcagaggggctcgcaggggctgggatccgcgtgcccctctctgcctcggtgcggagcacgatgtgcccgggcgggggcgaggacgtccgggaggggctgggctgcgcacgctcgcggggccgtcgcagatgggcggtttggaggcgctgcagtccctgggaaatgggagcctccgtcctgttctctctgctgcttggctgggctgggctgggcagggcaggaaagccagggtccccacccctcctggagcagagcactccgcgctggctgttccgggggcccgggagggcagagctgtcagaaggtctgtctggcatcattaggggagctgtctgtctctctatccctggctggcgtggcccggcaggaggcgaggctgatattttcaggagacctggtgatttgacctgacacctgtcagtcaggtaagcgctggcctcctgcctgcatccccctggggaagagccggttctgctccctgaccgggaacgggtccctcagtgctgaggatggcagttaatgagcccgccgaggggctgcccaccgggtgcacaggcaggagcagtgggcatatcccctgcttgccaggccctgcagaggggctgccttctcccccaatgccttctgcccccttctagtgtctccaacattgaccctggaaatcactttcttgcttctcttatcaggatagtcctacatgtctggaactttctgggatgttctctgtgccttggaagtgtttatttattactttaaaatcacctttagggtctttatccttaaagataaagccagtacctagaaccaggtgtccttcccgcagggctttaggccctacctgacttgggttctcagtcaaccctttccttccctgtgtaacgtgggttttggcttttgcggaagtaatctgttatggtctaaattgtgtcctccccaaatccatatattaaatccctaagcccctggctgggcgtggtggcgagcacctgtaatctcagcactttgggaggccgagttgggggcgatcacctgaggtcagaatttcgagaccagcctggccaacatggtgaaaccccgtctctactaaaaatacaaaaatcagcggggagtggtggtggctgcctgtaatcccagctactccagaagctgaggctggagaatcacttgaacccgggaagcagaggttgcggtgagctgagatcgcgccattgcattccaacctgggggacaacagcgacactctgtctcaaaaaaatagataaataaaataaaaataaaataaatcccgaagccccagtatctcaggatatgattgtatttggagatacagccttctatgaccttctataacctcagtccccaacctttttggcaccagggactggtttcgtggaaggcaatttttccacggacccgggtggggtggggggtggtttcgaggtgatgcaagcacgttacattgatcgtgcactttatttctgttgttattacattgtaatatataatgaaataattatacatttcatcataatgtagaatcagagggaccctgagcttgttttcctgcaactagatggtcccatctgggggtgatgggagacagtgacagatcatcaggccttggattctcataagaagcacgcaacctagatccctcacatgtgccgttcacaacaggtttcatgctcttgtgcacatccaatggttcctaaagggccacagaccggtactggtccttggcccaggggttgaggacccctgttctataaggtcgggagagaggcctcagaagaaaccaaccctgccgagacaccttgatctcagacttcagcctccagaactgcgcggtgatgcgttcctgttgaaggcactctgaccgcagtggcttgccgtggcagccctcgacaacaaatacagggtctgttgaaccaaatgaatccaaaatgtatgcccaaagatagccgccaggtctatgaaaacacctgctctgatatgaggggacgtggaccacagaggtgagtgctggaattcaagttggtctccttagtcattctcctgccccacgccccctgcccctgtaacagttacattgtcttaaatcgtactcgtttaaaaaggtatttacacaacagatcaacatttaagtacatgtttaaaagcaattatgaatgtgctcacctgtcagggcaggatggttttgctcatgtgtttccagttggttgggtaaataatcagctcgggtgttgttttgttttacacctaccccctactgtaattgtgtgtttacttttatgataacgtcacatcactctcatatttaactactagcagggattaagttattccaataaaagacagagaaataaatttcagaccctgtttcctgcctatccccacccccatcgttcaaaaattggacaattttccaagatgatcggaagcagttttgagcatttggaagccatggatgccctggcccgtggcagtgtttttcaacagtaacccacttgccgataaggtctccctgtgtggggtcaaaggatgtggcccctgccatccttgtggtcactagggagggtacaggcctgtgtgccacaccccagcctaactcctcctggggcctgggcagttttgatcactaagtcctgactctgccatggaagaggcatcttctgggcggacactgatgttcagtggcctccaggggacttggcgggtccccttgacacactggaggctccctggctagattcccctcccagacaccctcattcctgtatctccaggactggagaggcctgctggccatccaggaggatgtttctgttgtcgggcagatggtcagccccatgcagaggatgggaaagcttcacctgccacagttggtaggtatctcaacaaggagaccgtttagtaactcactgtgttcgtgccaagatggccatgtcgggcagcacagatccactgtggccagcaagcttacagacactgtgtgttgtcagagcagagacagtgtggagttaacatcgtcttcatcaccacaaactgcccttgcaggagcttggaggggacccaggtgctggtagtgaccttggcacattcacagggtgacggcagagacaatggtggtgacgatagttgggatagtaactcagactcacagctgcgtccatgtcttgcaaaatcacgtggtctcagttggtcctcacagtcctggaaattgtcatattcttgagctgtagggtggaggtgggcaggaggcaaggtctaaaattcacttctctctgcccgacaacagaaacatcctcctggatggccagtaggcctctccagtcctggagatacaggaatgagggtgtctgggaggggactttagctagggagcctccagtgtgtcaaggggacctgccaagtcccctggaggccactgaacatcagtgtccacccagaagatgtctcttccatggcacagtcaggacttaatgggtcctgaatgggtcctctcttcctttgctcacagaaggttttgtgatgatgccaacaaccaggactgcccttgccttccttcagattgccagagcagtcaggaatcttctgcccttagagtatatcgcggggtcctccctccacatccttgctgatagagctctggagagggcctttggggagcgtgtgactatccccggcatagtcgccccccatcaacacttattgtagggaaggaaagaagccaaacgtcttactgtcccattttacagatgaggagatgggcacagagaagttcagcaacgtggctcaggtcgaatgcttgtgatttttatttttgttgtttttttgcttgtgatttttatgtcttacacatttcctggtgcccttctgaaaaaattccacgttggaaactttgggacatgaagccatttaccagtcaggtcatatgtctagggagacactattgctacaggtgtcaagaagttttgctccagaaaaatgtccagaccaattctgcttcccaagtaggccaggatatccacaggacaccttgaaacagtgactccctcctgcattttgttgattgattgattgatttttgagacagggtcctgctctgtcacccaggctggggtgcagtggctcaatgtcagtccactgcaacctccacctccctggtttaagtgattctctggcctcagcctcccgagtagctgggactacaggcatgcaccaccacatccggctaatgtttgtatttttagcagagatggggtttcaccatattggccaggctggtcttgaactcaagatgattcgcccaacacagcctctcaaagtgctgggattacaggtatgagctgctgcacccagccccgcctgcattttaaatggctgcagccacacacaacatgctttcctcctttgcaagctcagctgggggggtgggtaagggaggggctcaggggcggtgctgttggttctttttacctgggttttctcacgcagagtaattgtgagaagaacagggtttcctctcctgaactcggaggaaacagaaaaaaatttcctactagcaaaagcaggcagaaaagaaattttagaagtaaaagaagttttacttcttaattagacttttcaatttatttatttatttttatttatgttgtgagatggagtcacactctgttgcccaggctggagtgcagtggcacgatcttggctcactgaaactttcgcctcccaggttcaagcaattctcctgcctcagcctcctgagtagctaggattacaggtgcctgccaccatgcccggctaatgtttgtatttttagtagagacgagggtttcaccatgttggccaggctggtctcaaactcttgacctcaggtggtccacctgcctcggcctcccaaagtgctggtattacccaggaggctgaggcagaagaatcgcttgaacctgggaggcggaggttgtggtgagtggagtggagattgcgccactgcactccaggcactccagcctgggcaacaagagtgagactccatctcaaaaaaaaaaaaaaaaaaagacatgaagccagacaatgggcccaaaatgccagggatgatctgaggtcctcaaaaagggtccaggaaatgctatatataaagagtcagagttgtgtaccaagaaacatacccatccactgtgtgtataccctgcacttcctggccctccatgcttgggcatggacgtgtgatatggtttggctgtgtccccacccaaatctcatcttgaattcccatgtgttatgggagggacccggtgggaggtaattgaatcatgggggtgggattttcccatgctgttttcatgatagtgaataagtatcgtgagatctgatggttttataagggggagtttccctgcacaacctctctctttgcctgagccatccatgtaagacatgacttgctcctccttgccatccaccatgactgtgaggcctccccagccatgtggaagtataagtccatcaaacctctttttcttcccagtctccggtatgtcattatcagcagtgtgaaaatggactcactcccaccctgtctggatctggacaagagcccaccaccccgttggcagtagtcaggcagctctgcttctaagaacctgcagcttttggaagaaaggcaccctgtggtttcagaagcccaagagtccctgcagctcagcacccccagcctggtgcttggcagatgactgcctcctcacttagcagagggagcaggtgagcatgtatgaagggccgctctcagatcctttcaaagagaagggtgtcatgcagatgccaacaggttgatcatcagaaccagagggtgctttaacatgcagattcccgggctctgccaaggtgattcccaaggtgattcctgggtaggactgccaaggtgaggcccgggaagctgtttctaaaagttcctcttgtctctgatgcacaacttgggtgacagccacagctgattgccagaaagttatggcgggagggggagatactgacaccaagccttgcctgggacccacccaagaggcgaagtgcctttctggcttgacagtcttggaaggaggggtcgggacgtctggcctgcatgggaaccctggagtttccatgcttctctcataggacaaaggcatggagttgtttttttttgttgtttttcttgtttttttttttttgtttttttgagatggagtctcactctgtcgcccaggctggagtgcagtggcgggatcttggctcactgcaagctctgcctccagggttcacgccattctcctgcctcagcctcccaagtagctgggactacaagcgtccaccaccacgcccagctaattttttgtatttttagtagagacgaggtttcaccaagttagccaggatggtctcgatctcctgatctcgtgatccgcccgccttggcctcccaaagtgctgggattacaggcataagccaccgcgcctggccaggcatggagttttatcagcaaagagtaaaccaaaatgtattctctgaacacaaaactggctgagagtgccaggctgaaagccgttgtgctgggagctgtgggtgctgacgtcatccccctccctgcccgatggctcctcttccagggtctgaaccagacagccaggaaaagtggcgttcagagcgctgggccttcaaggtgcccttggtctcttcggtagaaaacaaggaagcaacgtccttgtgtaggggtactgctctcctcctgggaggggaggaaatgagacgcagccacgtgtggtgtggggagtgcagtccgggcagagggtggtggctcctcaaatacccacccttggtttcctgcatacctaagggggtgtgtgactcaggggtccttcctgttgtctatggtgtctttacattcaccacctgaggggaagttttaatttgtaataaatctgtattacggtggatgtccaactgccccagtggctgtaaaaattaattccttatcctaaacattattacatagctttcgaaatgaatcgacttgtggttgggttcttggtttgggccattatttccaattagtataatcagatagcatcatccgtaatacttcccctcctatccccagccctccctgggccccacaccctggtcttgtcgggaactggattcgatgaagtcatcagaattgtcaatggcatacagtgggtggagactgcctgctgattctgatggctgagaaagaggttttctttccattctcgaatagtcaattttgctcactgttgttgtggtttgtttctttcagaaaactgtgtattcttcagaacatcatgataacctggcactcatgggtctatggagagaattcagggggtctgggagcttggatggaataaatttgcatctttattttcaggaaagttttactgaagtttagcattttctttcattataaatggaatcagtataacccaatagtatgagcagttacttctccgcaacatcaaagtggctgcagatatctcaaaatagtatttacatttatcataacttagaaatttgggtggtaattaaaccagcaactattctttgtttaatgcattaagaaagaagtatgtatactatcatatctcaattaaaaatattttaagaactggattttaactttattggtttcctttgtaactctctgtatttcattttaggcatttaaaaatattattttgagaagggcttccgcagatgtcagaggtgtccatggcagagccatgattaagatccgctggtgtagactacagcaggtgtgtgcgtctgaggttggtatggaagttgtgtttgtgttcaaatcctagtctcccatctcatagctgcacaaggtgtcccctgatccatcactttattattattattattattttttcttgggatggagtcttgctctgtcacccaggctggagtgcagtggcacaatctcagctcattgcaacctctgccttctgggttcaagcaattctccctcagcctcccgagtagctgggactacaggcatgagccaccatgcctggctaatttttttttgtatttttagtagagatgggctttcaccatgttggccaggctggtctcaaactcctgaccacaagtgatccacctgcctcagcctcccagagtgctaggattacaggcatgagccactgtgcccggcctcatcactttaaaataggaataatagccaccatacaagggtattgggaacgattaaaagtgttagtactacaggaataattctaggacctaacctcatacagctgcaggagcactgaatgagataatccatgaggttaggtcctagcattattcctgttttacagatggggaagttgaggtttatttcaagtaagtgcccaaggtcacatagctaggaagtggtagaactaggattcgagccccagccattggacagcggatcccatcccagatcctatattgccctccaaaaagtcaagcacccctgggtcagtggaagttgcaatctgggtcatacagagtctggaggccagtctccaatttctaggctcttagagccctcatttgaccttgagctctaacaaagtgctcacaaacatgtgccagtgacttgccacaatgaaggacagttgtgtgggtctatggtggggtgatgcgttgcttcttactgaatgtgaaataaagcttaggaacactagatctgtgtgcttcaggagtggtggggattgccctggttgagtgactggagcattaagtgagatgggatctttggtgtcatcctatgatgatggtgacagtggcagtgatgatgacgacaatcactttcttcctcctcctcttcctcttcttcttctgctgctcctcctcctcctcctccttcttctccttctttttttttttgagaacaagtctctctctgtcacccaggccggagtgcagtggcacaatgtcggctcactgcaacctccacctaccgggttcaagcgattcttccgcctcagcctcctgagtagctgggactacaggcgtccgccaccacgcccagctaatctttgtatttttagtagagacgggtttcaccatgttggccaggctggtctcgaactcctgacctcaggtgatccacccgcctcagccttccaaagtgctgggattacaggtgtgagccactgcgcccggccggcaatcactttcatgcagcatgccctttgggtgcctaccgtgtgtcgggtcctgatgctgcccttgaggagctgacagtcggggagaaaggaccaggaatgtgctgtcttaccccatcacaaaacaagagagagaataatgggtgtcacaagagaggtgccagcagcaggtgatgggaggttgtcacaatgataatgagctttaggttcagtgcagacttggctggtggggctggcaaaaccacagagattcagagcagctggggagaggcagtgtacattaatctgaacgaatattaatgtaagatcttaataaaattacatttgtgtctatttatctggctgtatgagtttccctaaatttggatgggcatgtttcagatggtttggcttaagacagatgttttccttttatataattcctttgtatctgaggtcatactctgtgagattttgatcttcaaaattggtccagacttattttatgtctcagcatatggactatcttggtgagggctccacgtgcctttgtaaagaacatgtattctgtaatcacggggtgtagtggaccttaaatatcaattaggtcacaatagttgttagaatgctcaatgtccttactgattttttgattttttttgtttactgactctgtcagttgctgaaagaaaggtattaaaatctccaactgtaatttttggatttgtctatttctccttttaattctgacaggttttgctttatttattttgaaattgttattagatgcatatacatttaagattgttaggatttcccaataaacatatcctttcgtcattatgcagtctccctctatctctttggcaatactctttgtcttgagcctattacagtaacatagccacacctgttttttgcacttattgtttgcctgtcatacttttttttatccttttatttttagtctgtctgtgtctttatatttaaaatatatctcggccaggcacggtggctcacgcctgtaatcccagcactttgggaggccaaagtgggcagatcatgaggtcaggagatcgagaccatcctggctaacacggtgaaaccttgtctctactgaaaatacaaaaaattagccaggcatggtggcgggtgcctgtattcccagctacttgggaggctgaggcaggagaatggcatgaaccccagaggcagagcttgcagtgagccgagattgcgccactgcactccagcctgggcgacagagcgagactccgtctcaaaaaacaaaacaaaacaaaaaataaaatgtatctcttggagatgacacatagctggatcttgcagtgttattcagccagattatctctgccttttaagtgggatgttcagtgcatttctgttaagcgtgattatagatgtagctggatttagatctgccattatgacatttgttctctttttgtcccttctgttttttttgttttgttttgtttccctgtttctcttttcctgacttcttttaggttaatcatattttttggtatccccattttaattagtttattggcattttagctgtacttttgcatttttaatagcggctaacttagggattataatatgtgatactgtgatataataaacaatatatatttggactttgttcctggtagaagagcttctaaaacttttagagtttcctgaatgataggggtgagagtcttgttagccttaataagcccctttcaaccatacctgagtttctgcttaggaggtgaatcttggtgggcccctcctaggtagcaagacagggtcttgccctgtccaccaagctggagtgccgtggtacagtcttggctcactgcagcctcaacctcccaggctcaagcaattctcccgcctcagcctccagagtagctgggaccacaggtacatgccaccatgcccggctaattttaaaaaatatttttgtagagatgggggtctgactatgttgcccatgctggtcttgaactcctgcctcaaatgatcctcctgccttggcctctcaaagtgttgggattacgagcccccacacccagcctcaaaggtgtttaaagaacatctactttgtgctcagtttcctcactcctccatggaaagcctgcagtggctctcctttgccctcaggatacagcctgactccttaatctggcttgaaggctcatccttacctgcagggccagggcggctcctctcttgccccttctgttgtgtattttgcgctccagtttctccgaagcaccaggctggctttgccatgagccatgtccaatggctccttccacccggacccctgtccccactgccatcagctgactttccctgtggcactctgctgacctttattcacatcctcaacacacctgccaccttctaggtgtggcacttcctgctcctccagatgggcttaagtgggcacagccagagctcccatgcctcatcctggcagtgacaacgtgtggcacctaagggaagccctgaccccagtcctgccaccgccttgttctggtgggctctgtgaggatgcactggatgaattcactagtgcagcagtgcttcgccttccagagggaccgtcggagccagccccgcgttgcagggacctgacgaccctgaggtccagccttccccgatgcccagcccagctcagtccactgtgtcctctttggcctcttcccatcctggtttctcagtcgttctcagccaagccacaggactggaagctttgtcgctttctataaggacttgcctgtcagggggagttagttcgaaaggaacggggagtgaagactcaatgtgaatttcaggtaaaaatctccgggtctgaggagactgggtctgacagccagtgctggcctcggggaccctgatggagacgttcacacaggtgcccaactgcaggacgaccctgccgaggaggcacctgctggggccaattagaattcctcgttctgggctgggttaatttgcataaactctgagcccccaggaaaaatcttccgcgaggcctcttcctctttgttaattgaaaaaggctctttgtctgtcttcagctgtcagctcacatgcggcctccccaggcaagcctttcccagctcctcagaccaggcaggtcgcccctgcggtctccgcgtctcctccccacacctcagctcacccactcggaattatctgtgagtttccttccagcttcagcgccacaaggacagggaccttgtctcttcctgtggtggttgtttctatcatcactaaatccatacctagtgcactagcgcacggtagaggttgtttgctcaatgaatgaatgcatttccttgtaggacccccggctgccccgagtgagccacactccttacaaagaccaggcaactacgttgaagaaatgttgatatttatcaagaaacactcttccaaccatttttaattttttttggacgttaaagtatttattgggtcgggtgtggtggttcacgcctgtaattccagcacttggggaggccgaggcgggcggatcacttgagatcaggagtttgagaccagcctggccaacatggtgaaaccctgtctctactaaaaatacaaaaattagccgggcatggtggctcgtgcctgtagtcccaactacttgggaggctgagggggagaatcgcttgaacccgggaaggggaggttgcagtgagccgagattgagccactgcactccagcctgggcgacagagcaagactctgtctcaaaataagataaaataagatgtattagacaaaaactgagagttcttactttaaattgatttggaattttgggtacacttatatatttttttctaaaataaattgaaagtgaatcataggagaaatattactttatataaatattattaacttgttttaagtacttattaaaaacaacaacaacaaaggccaggcatggccccttccacagagagctggtcagccagcattttctgcagctcttaccccagctgcctctcttctggtttctgagcctccccacccccacttaaggagcttacagctgagcaggagagataagatgttaagtgcgtggaaagattattttttatttttggaaagttgaacattttaagccaacatcccatgaggctgtgggattaggctggaggtagaacttgcttatcccatttggaattgctgaagcttcccagaaaggcttacttcttcctcttttttttatttctaaaattctgcagaaattcttccatgcccaggctagccttgggagaagagtggatgtcaagatgtcaatgatgtattggaacgatgggtgggaaagagagccagggggagcttttaagataacatcagaggaattggctttcaagggcgtggtggacgattttgaggactggctaatgcatttgatcagaagacgggtggtgatgggctgtgttcctatcctggctcccgtttctaaaaacagcaggcactcaaccagccctcaggtgtcccctttgtcccaggaagcttggcagaaggagccaggacgtctccagaggagcagatggccctcaaagctggaggaccatcaagaaagagcctccctggtgaggagaaacttaggttactgatatgggaactcaaaaactctcacttctgtgtacccaggagttcctattcatctccccaggaatcttaagtatctgaaggacccggggcagttgcacagagtggccatcgggtgtcagtgtggaattagaagccctgcctgcgttccttcgctcagctgcttggctttgagttagatgctcctggaagctgggcccgcagccccatgcaggctgggaacggggatggagccgtgaggattctcccttaatttaatggccccgtccactgagctgagaacatggctgtgatcctcagcttgggcagttcctattgtattgaggctttggagtgcttatgagctgggctgagtcacgctgataaaaagttaatttctatttgctgtggctcagtaattggatgaacatgaaagcaattaaatattaaaacatacaaacaaataactaagtcactgtaattagccaaagtttgatcactgtcatatttatttaggaagaggtgatatgtctcagcaggtgacattttaaataccccgggcctctctggtgttgtctttggagaatgctgaataatgtacagagaatttaattaaaccctgttgtaaatcagccatgatgacagggaaatgacagccacatgttgaaatgagaattagtccacagcaagggatattaattaactctttttctgaaggcctctggcacagagtggcattaaaaaaaaaaaaagccagcgctttgacgtggggaggggattgtgcctgttattatttttataatcatcattattatttatggcttgaatttcttcaatggccaaagtgcagctaataatcacgatgccacacaatgagattaaacaattctttccccaggcgctttgagacccaggtagaaaatagcgccataaaaggatgccagggaatgagagagtccctttggaaaacaccagcatttttataagcagcatattattttcttccggatttggactcggggagaataggtagggtggtattagcaatgaaagcacagacctcggagccgggagagaccacggaaatccgtagcccgatcccgctcactttatagaagaggaaacgaggctcagggagatgtacagatttgcccaagttcatagggcttgttgaaacagagtcagggtggagcgtgaccctgacccccggtcagtggagtttctgctaactgcctcgcccaggttttaaaatgcaggaagcagaggacagagatgtgccaggaatggtaagctgctgttgtgaagactggggaatagaaacgctgcttttgttcccgatgctaaaaaactccctgtgcaaatcggagcagacgtctctcttcaccatgaagacagtctggggtcttccccccatggtctcggctggcctcagccctggaaggagcttgccctagagaagctgctttagtccttctttgtgaatgcaaactcctgacaaataggacgcgtcttgcccagtgccccttcaaggagggaggcttcatcaatcagtgaaccagacccctggccaatggctggggcctgcaacatgccctcaagcatcccacagccttgcaacgattattaccttgcaggattcagctcacacattcccttccttggcaaagaagaaccaggtcagggcaatgcatttgccttccagcaggaaatgctgcaactccgatgtgtctctaggtgtgtggacaccatgtctgtgcacagtcctgggcacttgctcgagtagccatcagccagagcagccccacgcgggccacagaccatcactctattggccccctggggctggttatggacaactgcacgagccaatcaagagctcgaaaggatgggatgtcagttgcagtagacacagtcccagttgatcctgacatcatatataggcagaggtatggcttctggaacgctctagaagatctcttttagtgccccatagaggcaagaatctggccatggagagattacaaagcacagcctttattatcctccagattggagatggttggtgtagcacaaaaggctggtgattcagagaggcagctgccctggctttagggtttcacgtgtgcgtgagcataagtgtgtccccaaactctggcccctaccgatccttagaggaagggtggctggaagcagatgaggaagttgttctgagggctctctcggcaggtctgagaggcatttttgttgagaggagaacctctcaaaatgtcctgtgagtttggtttggatgatgttacctggaaggtcagggactcaacagcagcttaacctcatccccggggaccagcagtccctgtgtcaaagtcactaacgcagaggcacagggatcttggcttgtcatggggagcccatcatatctgggtcagccagagccttcaacacagggcattttcaccacttccaaatgaaatttgattggcagttagaatgaaaggttcaagttactattttcacccaagccatggttccgtccaaggagttccagagctcagacatgatatggccttgggggagatcttacggggcctgggaaggctgggatggggagggaatagggaagacagaacgggtgggaagctccagcaccgtatttcctaacccggtgggcctgcaaagctctcttatggaggtgccaatggttatctaaacaaaaaggggttctggggccacatgtgtgcagccaaacttttgcaaaaggctgctcactataagcctgtcttgaaaattcaccatgcttattagcataatacaggctctgagcagtcctgccatgtgaaattgtgtttaaatttgcttaatggagtgactctcacatttgtacgatcactgagcccacctaccccatttttgtgtgttcatagaacactgtggtgggcagagtaagggttccacaaaggtgtccatattccaatccccagaacctgtgactgtgccccctgacatggcaaaagggactttgcagatgtgagatgtgacgaagttaaggatcttgagataggagatggttttggattatcctgctacctaacctactcatgaatccttagaagtagacatttcctgtctgtggttagagacgtggccacagaagaagggtcagagagaagcaatgttgctggctttgaagacagaggaaggggccatgagccagggaatgtgagtgacctccagaagctggaaacagcaaggaagtgaattctgccctagaccctccggaaggtgcacagccctgctgatgccttgacttgagtgcagtgagacccaagccagatttctggccaaaagaatttgtaagataataaatgtgttttagtttaagccactggatcggtggccatttgttacggcagcagtagaaaaggaatccacacacctgtttacatgttggcattgttgtgagaaaaactgaccaggaatccaaacaggcaattcagaatgactgactgaccatcagtcaatgcactgcacactgtggaccaaactgaactgtgtaagacatgcatcctgcccctgaagagtttgcatttcacttgggaagtcaagacacacacaaatagaagagaaatattaacaatttctagggcacaaaaacgtatttatttatttattttgagacatagtctcgctctttcacccaggctggaatgcagtggcaacatctcggctcacggcaacctctgcccccaggttcaagcaatcctcccacctcagcctccccgagtagctgggaccacagcgcccaccaccgtgcccggctaatttttgtatttttagtagagatggggtttcaccatgttgaccaggctggtctcaaactcctgacctcaagtgatcctcctgcctcggccttccaaagtgctgggattacaggcgtgagccacagcgtgcagcctaaggcatgaaaacttaatgacaaagctgaggagttcaactttaaacagtgcatgcacccaccaggggtgactcggagctttcactggaggaaggagtctgggccttaaacgcaggaatcctccagggagagctgggatttaatgagggtgggggagtttcccttgggcttatgcagtgcagtggggtggggctggaaacagcactgggaggggctgagcagaagccacagcggggcagaacaaaggcctggagactggagcgagctgcgttcttgggggtggggggtggggcggcagctggagagtgggggcttccccagcgggagagggaggacgattctggatggcttccctccttgtggacagagtgagtctctgctatgagaaaggtaggagctctttcagctccggctgagaatgctagtggagccggctggagggaaggggctctccgggcatgagtggcagggtggctgtgctgatgacggcaccaagaaacctgccggctttctagatgcttcctcttatttctttccttgtctcaaggcctccatttttgcttctgtaagttttcctatgcaagttttgaggtacaggagtgtttgtgccaccccagcatgtgtggtttcctggtgctaggggcaggggagggccttgcaggagtggggtgaccctttgcaaaatcctgcagcgggtgggggagctggatcctttttttttttttttgagacggagtctccctctgtcgcccaggctggagtgcagtggtgcaatctgggctcactgcaagctccgcctcccgggttcacgccattgtcctgcctcagcctccccagtagctgggactacaggcgccggccgccacacccggctaatttttttgtattttttttagtaaagatggggtttcaccgtgttagccaggatggtctcgatctcctgacctcgtgatccagcctcctcggcctcccaaagtgctgggattacaggcgtaagctaccatgcccagcctggttttgttttttgagacaggatcttgctctgttgcccaggctgcattgcagtggggcaagcatagctcactgcagcctcaaactcctgggctcaagtgatcctcttgcctcagcctcccaagtagctgggactataggcatgcgccaccatgctcggctaattttaaaatgtttggtagagatggggtctcccgagtagctgggactacaggcgcccgccaccactcccggctgatttttttggatttttttagtagagacggggtttcaccgtcttagccaggatggtctcgatctcctgacctcgtgatccgcccgcctcggcctcccaaagtgctaggactaacaggcgtgagccaccgcacccggccaagctggatcttaagcttgcttaccggtgacttgttgacctcatcttggctcaaagaagacacggccccaggtgagtgcctggaggttatttcccatgtgatgcctgttccagggcaggaatgttagctctgtgctggccaccagagaagaaactggtggcctggtgaccgccaggcctctgcctgcaaggctaaagacctctgacagatattagggggcaggatgtgagttcagatggaagcagtcggatcttcctgaccctgccttacctggcagtatccacctgcagcctctgcacctcctgcccagctgccaacaacacctgtgagcctgacggcgtgccccaccccctccccaggtgggcggtctacggcaggccccgcccaccagctctggcgcatgcggcatggcctcagcgtctcccttcctgagcggacggcccaccccggaattagcctcttctctcccaggtctgtgcaatgcccagctcctcctctcctggccggcctggtctctcttctggtccctttcctcaccgggctttggggttctagggtccttgaagagatggagaccagtcagccaacttcaaggtggaggagtttggctggaacgagcaggtgtgtctagttggctggtgctagggaaaggggagggccctgcaggggcgttgcacctgtggagtaagcctttgcagaatcatacagtgggtgggtaggggggctggatcttaagcttgctcactggtgacctgttggggctggactgcctgaggctccccctttggctaagaatcaggtgtgggagctacgcctgctccctgggagggcagttccatagggatggagcctgagcatctgaatttccaaagctctgcggttgactctgatggacagcctgggccgagacccccaggcaaggcttctggaaagagttggccccgctcacagacggggaaccttctctggaacctgccctggcaggagtgctgttttgggaacgtgggtttcagactcacacctctctgggtttgagccttggctcttcccttaatgaccctgtgactttagaccaagacttcccctttctgagcctcagagtccttaccagcgaaatggaaggagttcctccatagcagagcctgcctgaggttgcttaattaattaagcagaaaaaatgttgattgtaaaaatggggggttccctagggccacaggacccttgagttcaactggatgctggactctaggtgtctccttcctctgccttctaggcctatcaattcatagaccgggcacccagggaaagaccaacctccatgtgtgtctgttccaagttcccaagttaggacctctgctggctcctggtccttcacctgtgcacaggggcctcctgtacagtgcagggactgtggtttccctgcaagcgcctgttgtactgaggagttgctagctctgtgcagaatactgccacgcggagctggagggcagaggcacgtcctcccaggtgatggggcatcctcttaatatttggagcacagacaggacagtggcaaggagggtatgggccccgcacacggacaggagtagtctgggcattgccctcggcctgtcccccgggccaggcaccaagggcgcagagggagagtcaatttctctaagtggaaggaagaagcactcttccaagggctctgggctttgaaggcctttccttaaacgaacaggagagtttatttatcttcggtcaagctgtataaatgtcaaagggctggcgaccccttttaacttgcagtgcagggatggctaggttatttgctcatgagtctggaagagccccagaggggagggcttgagccctttgcctgtctgttcacataatccagacagagtagatggcccatgatggctgccactaagtgacacctggcacgacttaggtggcttcaacactgtcctccactcagcacaccactccgcctactgtttctctgtttctccccctttttcccttggcttgtctctttttttcttccccccgcctttccactgtagctgttatcaatcacgatccccgcccaccccaccatgcgcatttatcagccctcatgaatgaccagaggctgtgggcatgtggagatggcgtctctttccaacctcagttcctgccatctcagtgatggccccaaacctctaggcaggaaagaacagggaccatgggaggcattggatgggcacatgggaccccagcctccaaatgcagagcttcaacttgccagcaacatttttttttttgttttgagatggagtttcactcttgttgcccaggctggagtgcaatggcgtgatctcggctcactgcaacctcagcctcccgggttcaagtgattctcctgcctcagcctccaagtagctgagattacagatgaccgccaccatgcctggctaatttttgtatttttagtagagatggggtttcaccatgttggccaggctggtctcaaactcctgacctcaggtgatccacccacctcggcctcccaaagtgctgggattacaggcatgagccactgcacccggctcagcaacatttttttacattaggaggggaaaaggcaatggggctgcatagaaagtctaaacactacatctacggactaaatcatttaaaaaataacttgcgtatgacttatgttaattattttacttgacattaacacacttacttgatccacatgtcctgtttgttgataataaataagttatactgctatgacaaatgtgtatattttttcttttaaacatttttaaaagagatggggggtctcactatgtttcccaggctggtctggaactcctggactcaagcaatcctcccaccttggcttcccaaagtgctgggattataggcgtgagccgctgcacctgccctgacaaatttatattttaatgagttcaatctgaactgacttccatacatgttcttttcagtcagggtgatggaggtataatttgcatacaataaaatttttgcattttggcacacagttctgtgcgttttgataaatgcaggcagtcgttcaaccagccctgtaatcaagatgtgaacagttcatttgctcctcccaaaacattccctcatgttcctttgtagtcaaaactccctctctccttggtccctggaaactaatcatcggtgatctttccctatagtttcgtcttttccagaatgtcatagaaatggaatcatatggtaggtagccctttgagtctggctttttttccttagcataatgcatttgagactcattcatgctggtgtgtataacagtagtttgttgttattactgagtagcatcccattgtatggatgtaccacagtttatctgtttaccaagtgaatgatgtttagaatgtttctgtttcattttgttttgtttttttgagacaggatcttgctctgttgcccaggctgcattgcggtggtgtgatcatagctcactgcagcctcaaactcctgggctcaagtgatcctcctgcctcagcctcccaagtagctgggactaccggcatgtgccaccgtgcttggctaattttaaaatttttggtagagctggggtctcactctgttgcccaggctgggcttgaattcctgggatcaagtgattcttttgccttggcctcccaaagtgctaggattacaggtgtgagccactgtgcctgacctgcttctggtttttaaagatgaataaggctgctgtgaatgttgacataccgggttttatgggaacatatggtcccagtatggactcttgggttgtgtagtacatgtatgcttaactttgtaagaaatggctgtaccatcttgcattcccagcagcaatgaatgagaattctgtatctcagccaatacttaatagtatcagatttttaaaaaattctaaggcagggtgtggtggctcatgcctgtaatcccagcactttgggaggccaaggaaggcagattacctgaggtcgggagttcgagaccagcctggccaacatggtgaaaccccgtctctactaaaaatacaaaaattagccatgcgtggtggcgcgtgcctgtaatcccaaatacttgggagactgaggcaggagaatcgcttaaacctgggaggcggaggttgcagggagccaagattgcgccattgcactcaaggtctcccacctttgctaccactagaatttgtaacatcgacgagtgcaaacctgattttctctgggtcccagggtcctttttcttccccctgaagatcacctcagtttttgaaaaggtgccctggaggttctgctgttctttagctttgatgggttctgcaaaccctgtgagctcctcagtgcccagcaagcctgtgagcatgacttttgtgagctctgccagatgaacggcttagaagtcctggagagaggcactgggaaagcatttccatgctcctccttcctcttggatgggatgtggccagagaacacagaaacctaccagtgaataaagagaactcagttctctacccttggaaccatcgaggagctgggatttgctttagagaggggcagcccttggcatctccatgctgggagtggagcttctggcttcttaagaagttggttacaataggcagcctctgtgctttggcctgtttggatgttttctgctgttctcaggtggaaaaagcagattttgttgctgcctaccttttgaagaccaggatggaatggagctaccttctgggcactttcctcaaaagggcctgtgtgttctggaaccagggccttctgatgcatgagaaccaaggcagctagtgtgtgtgtgtgtctgtgtgtgtgtgcgtgcgtgtgtgtgctcatctctaaaatctgcctatggcaagtctcaggtggctgctggcagctccttggggctccctgctgttttgggtcatgtctagtaacagagagcttctcttttccagcgtttcaggcaaaggttcctagcttcgcactaattggtctgggttggttgatgtgcctacctttgaacccattccctgtggcaaagggatgggaaattcactgactggcttagcgtgggtcttgcgctgtatccctggacccagggatggagtcagccttctgagaccaacacagatccccaatttagaaatggaggctgagctgggctcggtggctcatacctgtaatcccagcactttgggaggccaaggcagtcagattgctttagctcaggagttcaagaccagcctgggcaacatagtgagacctctgccccttgtctgtacaaaaagttaagaagcaaagcatggtggcacatgcctgtggtcccagctagttggaaagctgaggtgggaggttggcttgaacccaggaggtcaaggctgcagtgagccgtattgtgccactgcacttcagcctgggcaacagagcgagaccctgtctcaaaaaaaaaaaaaaaaaaaaagagagagagaaacagaggctgttgggaaaagggcataaagggcatggatgctagagaggagatcaacaggtattgtcttatgaaggttgggaaggtcaagggcaggtggccacatcctttgaggtagatgctcacaagaggattgtgcagtgtgcaggtagaggcccacactgggtgtgagtgtgcagtgtgcaggtagaggcccacactgggtgtgagtgtgtagtgtgcaggtagaggcccacactgggtgtgagtgtgtagtgtgcaggggtggtgcccacactggggagtgtgcagtgtgcaggggaggtggtgtgttggcctagggactgttggtgcctcttacactcaacaccagcaggaagatggcctcgactcagtgaccatgtgggttgggccgagggcaaacacaaagacggaagccagcccttgtctctggggagcttagctagggtgccctggtgggagacaggcttcctttctctcagtttcctggatcctcttcaataaagagcccccctccacggttctgccccttaccaatgttgtttctagctccatcccatccttctacacccagagtgttgctttttttttttttctgtggcggagtctcactctgttgcccaggctggagtgcagtggcacaatctcggttcactgcaagctctgcctcctgggttcacgccattctcctgcctcagcctcccaagtagctgggactacaggcacctgccaccacgcccagccaatttttttttgtatttttagtagagacggggttttaccgtgttagccaggatggcagaatgttgcttctaatcaaagcaattcttgcacatgggaacaagttccagcacaggggagcccgtgatggcaaaccacggctgttgagtgtctacccttatatttctaaatcaaatgcttagctttaaatagcatcgctgacctgactgtggacgtgagtttctagcatactctgaccatggtcctttgtattgcttgacatctaattgttttattgtctgtctttgcaattaagaaaaatctattgttagaaattcttcactttgggaggctgaggcaggcagatcacctgagttcaggagtttgagaccagcctggccaacatggcgaaaccccatctctactaaaaatacaaaaattagctgggcatggtggcacacgcctgtagtcccagctactcaggaggctgaggtaggagaattgctggaacccgggaggtggaggttgcagtaagccaagattgagccattgcactccagcctgggtgacagagcaagactccctctcaaaaaaaaaaaaaaaaaaaagaaaagaaattctttattcttctacttatttcatcaacattaggtcatctactggaaaacatcatgcagactgccactgggagccagggtcagactctctggtttcaaatcctagggcctctgttttctcctctgtgaaaagaaactaacaatcaaatctaccacctagggatgtctggaggattccgtggccaaggcacatcaagggctcagccaggtggagacccgcgatttgggcccgtggggtggagctgatccctgggcgacctccagtccacaggccatggcccagagggcaggagaggtgtcactttcgtggcccctcaaccaggcctgggatggctgttttgtctgagcacaccagtcttgcccaagtctgaatgttcagccctccttgtgcccaagatcctctgcaggggaagagaaaaagagagcgagagcgagcacgcccgggagctgggcgcccgggagctgggtgcccgggagctgggcgcatgcacacttagcatgtcctctgcgtacccagtgcagccgctgttaaaaatagaactgtgctttgcagagagattctcaaatgacacccaccaagtgcccattaactcatcaaagtggtgattccaaattgattatttcgagtgtaagacataataacatgttcatcatggaaaataattagcggtggagtggggccgggatggcctgctgcctgcctgcctggctcccccctgcagccgagagggaggggtgggtgggcgccagggcttgatgtggttttcactgggagagttggtgacttacgactaatactcaccctgccacccagcccctcccttagcctgactggccagccaggccctctcccaggcatggtgtgggtctcctgtagcccccgagccccctccactctgtcctgggccagcctctcctttttggctcctccaagtgggcagtaattggctgggctccagctgggagcctgggttatggttgacacacatttctcacttgccgagtgcgggcagccgctgcgcaccttcacaccgtttccttggaaaccaaattgctttggcagcattccacggacacacacacacacacacactctcatgcacatgtgtgccccacgagaaaatcaagtgctatgggagctgtcatctcacttgccctccacccctttcccctggagcccctgtgcccctgccaggcagccctaaacccaggctgagaccccacagggggatggttggaaatgctcccctctggggaaggcagatgaagcgtctcctagaagagccggcgtctgctgaggtagcagattgagcaagatgtttatgggcacttagatgggaaaatggctcctgagggtgtgaggagagcagccagctcatgaaatgaggacggggctctggaagcctcccagcatcctcggagggggctttggtccagatccgtgtccctgggggcgaggtgggctgtgcaggaagggcctctgcagctgctgcgcccctgcccacctctcagccagctctcttctcccttcccaccttcccttgctgctttgcacgccccaggtagaaaacatcgtagcaggaaatacttgggaaaaggctgtcctcgccctgattgggggatgtccaccgtcacccgctccagtcctgggaagctcattcctcctgctcagctccagctgagtccttctcctggacttgccttcagccagagacagtgggcttcccaaattcatgccgccctccacaggcagcttgcagcccacgctggccggtgcaggggataaaggcctgtgcaggagataaaggctgggatgccaagagtcaactggagcaaccttcctcacctcctccccagctccagagctgcctgttaggatggctgaggctttgttgcagctgcattgcagctggatgtctccaaactcctgcacgcggatctccatctctgactcagctccccaatgtccttcagctaaccgtgaccttccttacttccatcccttcttccgtaatcctttaaacagctgctatgtgctgagcactgtcaacaagaccaggttcccatttgcagggagcgtgtgttctggtcagcacaggtggaaaagaaacagtaaaaaaaaaaaaagagggcaagaagtgcccccgcagggttgaaataggtgctgtgctagcaattgccaggggtaggggcttctttctttcttcctttccttccttcccttccttcccttccttcccttccttcccttccttcccttcccttcctttcctccttaccttcctttttccctttccttcccttctctttctctttctctttttttgaggcagagtcttgctctattacccaggctggagtgcagtggcgcaattttggctcactgcaacctccgcctcccaggttcaagtgattctcctgcctcagcctcccaagtagctgggattacaggcacctaccatcatgcctggctaatttttgtatttttgtagagacggggtttcaccatgttggccaggcttgtcttgaactcctgacctaaggtgatccgtctgcctcagcctcccaaagtgctgggattacaggcgcgagccgccgcgcccggcctgcatcagcacccacagttcttacaggggtctggacacttaggcaccttctgcttggcacaccccaaaattccagactcccagaaggaaagcaggtgctcaccacgagccacattttttacacacgtagcctaggcacagggagccacgcttgcgttagggaatgggccacgcttctgcaatcgtgtccccagatgccgccaagggctggccttccaggcaggcctttccaaggggagcagtcttgggccagaaatggcagccctttcctgggcggggacagggacacccttccactgtgaaatcattccattttcctgcctaggatttagtgcctttcatgtgtttgggttctgccagctggcggggaatcacggggcaatttcagtcactcaagtttctttcccaatccaggagaaacctcaagtctcactaagaaagtggtagaaggagagtaacaggcttggtttgcagggggtgggggtgggggtgggggtcaagacccttagacgagctgcagctccttgctgagaacgtgcacacactcaaaatttgtggggggcccatggtcctctggggctcctccggcaccccaggtgaagcttctgaaatggcttttccacctggacaatccctccctccccaggtggaaggtgagggggttctgcttctccccgggcagaagcagaaccacagcccctttgtcccctttgccagaggcttcaaggggcagcgtcccccagcgccccccgagcaagctccccatctgacaagggaggccctagctcatcccagaagcatcagagtcatccttcacactcaccaccatgctgaggacccagaggggctcatgcctccagtgtcagacaggattgagatccaggctgtctggctccggggtcttagccctgacactcgacttcagagggagttcttgcctgggagtgccttcaaagcacagtccctggacactttcccctgcgacatttagtcctttaaggaggctgtaagcacgttgacctgccccagagccagtcgtgccctcacgtccctcaggacggcccaccatggccaagcacaggccagagaacagccttgttgttggcgtcaggactgttggcatcagggtcctgcttgtcaggttaggaacgtggttcctttacctgcacctccaggtgatgctgtctccatccttagaacctgaaggcctaggtccctaaaagtagcagcagcagcagtagtagtagcagtaatagtaggagaaggaggagctgaagacctcacaataatcattgcccaaccgcgtgaaccagcccatcttaagcatggaacacacactgtcgaattctcacacctccttttggagcgggttctctcaattatcccatttacagacaaagaatctgagactccaaggggctaaatgatttgctcaaagtcagggtaagtgtgagaactggagccgaaacccagcctgctggacctgagcccctgactctcaaccttaagccacgctgtctcccatggatccctccagggccaggcagttggtgctcaataattgcatactgcgtggaggtgagctgggctctgggtgtggccaggtggtgtccctggagggctcagcacacctttctcaggtaggtggtattaggcagtgggctcatgtggtcctgattcagaggcggagaatgggagtgtttcagggatgcaggtatgagcctggtcctagcacgcatctctaggtggggacagactcctctcagccaccccattgcccagtgatagttcctttgcactgatgctgtcacatccttgtcattctgggggattaaactctgccctctggatgtgttcatgggcagctcagtaatacaaagaagtcattcataagtttactttgctttcgactgccctttcatggtaacgttggttcaagggaatcctgtgattccccaaatgtggggagcaaatcgagtcaccatgagtcacctccccaggctgatgtcttctctggcacatgtggccacgggggagccaggatgggtctccttcctcactccatctgctcgctgggtcttggtctcaggtgcctcttcccttcactgcctgtcttttattcctctgtctaccctctcctcatacagaaattgggatttctcatacagagaaatggagtgattgctcctgattgcacagccgggagggctgtacactggagcccctcctgctgcaattaacttattttccacccctgcggtgtgtggttcctggagcaacgcctgctacctgcttctctgccccatcctctgtgaggaagggtccatgctgttcctttttctgtctcaaaaatgtgctcatgtgccccaagttgtgtgaaccaccgactctgtgctccttccaggccctgaccagtgtgtttgagcattaaagctcgcaggtacatcaaaggtgctcagtaaatgctggataaatcaatccatgctttcctgggctctcctggtgggatgcattcttttagctaagcgtccctgccaggggagtggttggtttccatgaggccagagggggaaaagctggttgacccctatcctgggcattcagagtcatttcccgctcctttctgtggctggaaccagaagaatatatctcaggtctaatagggtatggactgcataaagcctgggatttttgtgcattctgttcatgacaatgtctctagcctgttgaacagcccatagtaggcactcagcaaaccaataggaactgagggggtcaaggaaatgccctgtgatccccctgaatccaacccctctgtctttgcccacctttcctccgttaaaacacagcctatatcaatgagggcctgggagaaaactggggtgggggaggactgtgcctctcttgaccttcatttacaaaaaataagttggctcctagacccgtgttggagccacactgcccgggacagccctgaagcagccacgtccccacctttcaggagtcggccaagagcacggtggctgcagaaggccctggctgatggagataacatttgacaaacagggtgagcgccttccccctccgcccctcttttagaaacccggcgttctttatggctttgctcaggtagatcattcattgccataaattttcttatctccagtgcttttccaattatggataacaacagaaaagcagtcattggtttctaaaaggtcatcaagatataaagcccgtttgggaagggaatgacttacgcagtgggcttgtataaatctggagaagttttatgcacaagtcggacaagaaatgtaagtgagattcataaaatatataacgattcatggtgtctcggctgatgaaaattgtctttccttttgctgtttgtgtgggaattatttgttctttccaggtgttctacatacggctcgggagccagcaagtgcgtatgaagccccttcacatggctagtggcatcctaaggacccggcgacaattagtcatggcgtcatcgaacaccaggctggaggaggtcttggatgccacagctccttttgaatttcaaagacgttcaaatccccatctggctgttacacttttaggctattgagagtgaaaacaagcactgacatgaacacccaaccagctgccggtgacatcgtccccttctgagatctgaggacatggatacccaaccacctgccggtgacatcgtctccttctgagatctgaggacatgaacacccaaccacctgccggtgatatcgtccccttctgagatctgaggacgtggatatccaaccacctgccggtgacattgtctccttctgagatctgaggacatggacaccaaaccacctgccggtgacattgtctccttctgagatctgaggacatgaacaccaaaccacctgccagtgacatcgtccccttctgagatctgaggacatggatacccaaccacctgccggtgacatcgtctccttctgagatctgaggacatggacacccaaccacctgccggtgacatcgtctccttctgagatctgaggacatgaacacccaaccacctgccggtgatatcgtccccttctgagatctgaggacgtggatatccaaccacctgccggtgacattgtctccttctgagatctgaggacatggacaccaaaccacctgccggtgacattgtctccttctgagatctgaggacatgaacaccaaaccacctgccagtgacatcgtccccttctgagatctgaggacatggatacccaaccacctgccggtgacatcatcttcttctgagatctgaggacatggacacccaaccacctgccggtgacatcgtctccttctgagatctgaggacatggacaccaaaccacctgccggtgacatcgtctccttctgagatctgaggacatgaacacccaaccacctgccggtgatatcgtccccttctgagatctgaggacgtggatatccaaccacctgccggtgacattgtctccttctgagatctgaggacatggacaccaaaccacctgctggtgacattgtctccttctgagatctgaggacatgaacaccaaaccacctgccagtgacatcgtccccttctgagatctgaggacatggatacccaaccacctgccggtgacatcatcttcttctgagatctgaggacatggacacccaaccacctgccggtgacatcgtctccttctgagatctgaggacatggacaccaaaccacctgccggtgacatcgtctccttctgagatctgaggacatgaacacccaaccacctgccggtgacatcgtccccttctgagatctgaggacattgatacccagccacctgccggtgacatcgtctccttctgagatctgaggatatggacaccaaaccacctgccggtgacatcgtctccttctgagatctgaggacatgaacacccaaccacctgccggtgacatcgtccccttctgagatctgaggacatggatacccaaccacctgccggtgacatcgtctccttctgagatctgaggacatggacacccaacctgctgctggtgacatcgttcccttctgagatctgaggacatggacaccaaaccacctgccagtgacatcgtctccttctgagatctgaggacatggacaccaaacctgctgccggtgacatcgtccccttctgagatctgaggacatggacacccaaccacctgccggtgacatcgtctccttctgaggtctgaggacagacactcacatggacacctaaacacctgccgatgatattgtctccttctgaaatctgaggacatggacacccaaccagctgctggtgacatcatctccttctgagatctgaggacagacactcacatagacgcccaatcagctgctggtgacattgtctccttctgaaatctgagggttggaacacattggcctggctcagtgtttctccatgtggttttgagaccacctgagttggaaccgatatgggttcccagcctcacgcctggagagctggattttgcgagtgtgaggttaggtccagcatctgcatgtgtaacgagctcccaggtgtttcgtagatgcattagggcttgagaagctcctttctagcaccatcttcctttttgcgcatgagggagttcaggtccagagaaataaagcagcaaggttagtggcacagctggcgccccctgctttctaggaatttagaatattattgaagagagaggtattagaacctgtgaagtcaatacagagacctccaggcgagtggcatcctcactgaaaccactgacaagtatgctgaatagaaagtgtcatttctcctggaagaccctcagtgacccagctggagggtctctcctactcatcagctgtccctcactctgccatttcagcagctctgctcaccctgagcatgcagagagagcagcttttaaatgagttctaatccagaccagcttggctagcattgtctgtgtagaggtgtgctagtaagtctaacaactggctctctgagagagagtagccctacctaactggtagcatttgccacttcccatggtgtaaatactcccagcatggccaacttcaagcttactaagaggatttcgctgatcatggttttggggagagatgtgcagattgactcctgccagctagtaggagccggctccagcacaccacggcatctgtgtccaggaaccaggctgagatgtgggaaggccagagaaggaggaggctggcagatgcctgagggctgggaaggattgcatccaggaggacggccgtggtgggcatccctgcattggggggcagccgggcccaagatccagggggacagaaagcacaaatggtgctggggttcagtgccacactcaccctggggcagaggagggtgacactggccctgccacctgacctcagcctcaggggctccagatcctagccagaggccttgagtgcttcctgccacaaaggcagggggtggcctgggatttcctctctgatcggagctgatgtttccctccaggaaaccatccctgctcaccttgctaggcctggggcaagttggagtgaagggcaggtccctcagccttgcctttgagaccttaccttccacttcattcccgtctgtggctctcattccttccccacccctgccctatgctctggtgagaaggtgcaaccctgtgagcccccatagcaaggttcactccagccgtgctttctgcttgcttttggtttgtgaaaaccctccactttcttagaggccttctgcaaatgtcatttcttcataaggatcttcctaccccgcccgagccagggagatccctcccttctctgagcctagagcaccatgtcccttccctgtagccctggtgacgtgcaccctggatggtggcccttccagtgacatggaggatgttttccctctacagacactgtctggttttaggatcccggagccaggcatctcgctcacccctgtagccaccacagcattcagccctgcagcctgggaccttgctaaggtcttgctttacccctaaaaaccaaaaatagtgtgtcacctttagcagtgattgccaacgcctctggagtgctggctgggacaggcatctctattttcatcctcaccaatcctgccagggagctactctggggagccccatcctgctgatgaatgaccgagtctcgcagcgatgacggaacctgcaggtcccaggcttgggcccaggtctgtctttctccaggggcctcacatccatctccttcccagctctccttttctgtaagacttcacagaacaggttcaaaatccatttgctggccgagcacagtggttcacgcctgtaatccagcactgtgggaggcctcgaggcaggtggatcacctgaggtcaggagttcgagaccagcctggccaacatggcgaaaccccatctctactaaaaatacaaaaaattagccgggcgtggtatcaggtgcctgtaatcctggctactcgggaggctgaggcaggagaatcacttgaacccgggaggtggatattgcagtgagctgggatcatgccattgcactccagcctcggcaacaagagtgaaactccatctcggacaaaaaaatccatttgctaataccaggctgagggtgagctgctgttctcacctgggagagatgatttgtcagaacatgtcttaaaaccggctgctgccatgcagagatagcacatgacacgtgccaccagccagagccgctagtccatgggccaggtagggtcctccccaccccagctccgggaatgggaccccaggattggcaacacctgtggatgccacatgggtctgaggtcactgtgcagtgcggcgcttgggcagtgacctggtcctttcactctttcctccatacttccttatctcaaggtaagaaaggaagattgacaactcaggctgtagagtcagagagtcctgggatcaaatcccagcttaaccatataatctgtgtgactttgggtgaatgattgaaacgatctgtgctccgtgtcaccatccacacggtagggatcacagttggtctctgtctctgggaggtctgtgggctttaaatgagacagtagagatgaagtgcttagagctgtgccccgtgcatggccagtgtgcaatgagatggtctcagagtattatggctggagtcaccacttgtattaccaggaagcccagcctctgtgattacaggattccaactatggtgactctgcacctcttcctttttctcttgctttctcattcgtcttattaccatttgctgaaattaaatcagaacacacaggggaagcacctatccttgcccagcacatagtaggcatcgtgcaggagtctgtgagtcacatggtttactcttgccctcctccccatggttcctagcacggtgttgaatgtgtagcaggccctccctaatggacccaggagatcagcctgggcactctctcattctcctcctgcctcccacccttgattccctcataagacagcagcacaagtgacttctaggggaaccgtattagtctgttgctaagaccagataatttataaagaaacgaggtttcattgactcacagttctgcaggctgtacaggaagcatggctggggaggcctcaggaaacttacagtagtggcagaaggcaaaggaggagcaggcgtcctcacatggctggagcaggaggaagggagagagcggggaggcgccatcacttttaaacaaacaggtctcgtgagaactcactcactgtacagtcccaagggggaatgtgccaaaccattcatgagaactccgcccctctgatccagtcacctcccaccaggtcccacctccaacactggggactatagttcgacataagatttgggtggggtggcagatcccaaccatatcagaaagggtctttatgatcagtggagagtggcagggaggtgtggaccatggggagacacagtcctcctggaccttggagtgagaggattcagttttagcaaaaacaggagataagactgtctggaattgtccttctgtgtgaatgacccgctcaaggtctcaaggcaactgcatggcccacccgctccactcatggccctctcacccccattcggcaccccagccttctccttgtggggtcaccccgccccacagtccgacccgggctggagtgaaatctcggctgactgatgcgccttcacggaagatggcatggaggggatccactgtccccctcaggcctcttctccaagacaaaggacagtcatgtacactggctcacagaccacagagatgctggtagttggtgtgcaagagcatttatcatgttggagaatgacaaagagggagcaggtgtctgacctgggatgagagaacacggagcggtgaaggcacaccaggggtggagagggcagagacaggctgtcatttttcagcacaattttcctccctttaatgttcccatagattatgggaccggatcatctgatggccgaaagagatgttttatggtgccagggtggaaggtttgaggagagggaaaaatgattgtgaactttctgtcctacaaaggctctcatggtctatagaatacaaagttgattttgctttgcttttcttggaaatgtgctagagaggagaaaggtaaataggatttaccagcctcctcctgcatgcaaagcaaatggaaagaaccctccccccttgaacctccgttttgcttggaagaagcgggatgtgtcttcttgttccccttcaagggagatttaagaggtcctctcctggaacagcacagagtttaatgctaaatacttttcaaaatcttttggtcatctacagttttctctcctcggctctgcggtcaggagggtttgaggaaagaggtggaaagttctctctccgagggaccctgtccccaggcctcatgtgttccagggccccgtttgcagttcttggctgtatgagtgaaaatctttattgaagaaccagatttcttttttgcaaggagaaaaaagaaaagaaaccaatatccaattcaagtaggggccaacaagcaaatgaaaacatgctcaaattgattagttttcagggacattcaatttaaaaccacatgagatagcatttcatgcccattaggacggctggagtcaagacggatgacagcaagtgttggtgagtgtgtggggggttcagaaccctcgtgccttgcctgtaggaatgtgaaatggggcagcctcttcgaaaaatggttttgtagttcttcaaaaagttaaacatgaaaggccaggcatagtggggtggctcacacttgtaattccggtactttgggaggctgaggtgggagggtcacttgagcccaggagtttgagagcagcctgggcaatgtggtaaaactccatctatacaaaaaatacaaaaactagctgggcatggtggtgtgcacctgtagtcccagccactcgggaggctgaggtgggaggatcgcctgagcccaggaatttgtggctgcagtgagccgtgatcatgccactgcactccagcctgagagacagagtaagaccctgtctcaaaaaaaagaagagaaaaagttaaacattaaactatcatataacccaggaattctgtccctaggtatatgccccaaataattgggaacaagtatgttgtttgtttttttttgtttttgtttttgagatggagttttgctcttgttgcccaggctagagtgcaatggcatgatcttggctcacctcaacctccgcctcccaagttcaagcgattctcctgcctcagcctcctgagtagctgggattacaggcatgcaccaccatgtctggctaattttgtattttcagtagagacgaggtttctccatgttggtcaggctggtctcaaactcctgacctcaggtgatccacccgcgtcggccttccaaagtgctgggattataggcataagccaccacacgtagctgggaacagctatttaaacaaatgttgtacacgaatgcccgcagcaggactactgacaatagcccaaaactgacaacaacccaaatgtctgtcaatggataaataaataaactgtggtctataaatacaatggaatattattcagccatgaaaaggaatctagtactgacacatgatacgaggtgggtgaacctcaaaaacatcacgctaagtgaaagaaaccagtcacgtgttgtagatcctatttataggaaatatccagcagagggacacacgcagagacaaaaggcagattgggggttgccaaggttgtggggaggggaaatggggagtgaccactgacaggtacagggttttctgttggggtgagtaaaatgttttggaacttgattgatacagcattgtgaacatataaaatgctgctgaattgttcactattttttttttttctttttgagacagggtcttgctctatcacccaggctggagtgcagtgacgcgatcacggcttactgtagccttgatctcccaggctcaagtgatcctcccacctcagcctcctgagtagctgggactataggcgtgagcgacaacatggagctaatttttttattttatttttgagatggaggcttgttctgttgcccaggatggagtgcagtggctcgatcttggctcactgcaacctccgcctcccaggttcaagcgattctcctgcctcagtctcctgagtagctgggattacaggcatgcaccaccatgcctggctaatttttgtgtttttagtagagactgggtttcattatgttggtcaggctggtctcgaactcctgacctcaggtgagccacctgcctcagcctcccaaagtgctgggattacaggcatgcaccactgcacccggccaattttgtttacttttcttagagatgagttctcactatgtggccaaggctggtctcgaactcctgacctcaagtgatcctcccaccttgcttggccttccaaaatgctgggattacaggagtgagccactgctcctggccagaattgttcacttctaaatcattcattttatgttatatgaattttacatcaatgaatagatacatgtttatgtctatacaaaattcaagcagggccctgggaagcaggctgggagagccgggctgactcaagggaaattgttgtgaatgggtgaaggggaggttggtttttcttcagaatttcttgcttcccccatcttagtaatacaggtgtgagaagagcatcaggtactagataaactcctccttgggagtaacctcggacagagccaagaacgcaggggacacgaaatggcatcttaccaaccttgcttatcttctctcctgctgcaaaatccccctgcccccaatatgaccacctgcccaaatgtccagccctccacctagggaataagctggcccgtgggaacagcacaggtgaggggatggctccaggcagccaagcacgtggaaggtgagcctggcccccagagaggctgtggcccttctgtctccacccacctgtgggcaccacgagggcctggctggggatatctggttcctgccatggaggtagccagggacagccccttaggctggttccacagtggcgtccatggaggaaagggtgaaactctcggtggtgctggggtcccaggcagcacgggaccttcgtggatgggatggcggacattctgctacctgctccgttccccgggatcacacctcagagctctccttgccgactccactgtggactggattttgagaagcctcctcctggagggctgtcacgttcccgcggggcctctcctgccctgcaaaggctgtgtggggccttctgtgcatggcgcgtggggccttctctgcatggcgcctggggccacaaggcagagatcagctgaacctgcagcttctgctgccctgcccaccagcccccatgttcaccccaccctgattacgatcttctccagtgcctagtgatgcccttgggacaccttcccttcctccactatgtccccacctggctgcctgtccccctggctggaagcccctgggaggagtgggaggctgctactggccagcctgagctcagcctggacactgtctagctaggcttgggggcggcctggaaggacccacatggaacagtgggcgggggacagtgccgggacccctggctctggcagtccaccagatccggtgggctagagggccctgcgtgtggtggccacaccgcccaggggaggcctggctggttccacaggccctggaggcgggcagataagtttggccttgatctttaacctcctgatccttgcccaaggaaattgtaggagcccccaaagccagaataaacttctccctcttcttctggatgggcccatccactgcggccagccatatctttattattttaagcaaaaaaactaaagctctggccccgtctagaacaagaaccagaggagaggcttatagagttgtgtaagccttggggggcagtgagagaaaggtccccgaccttccaccctctctggacagaagtggctgctgagggtctagagagtgccctctctccttgcattaaccccatgcagagtgagtccccgcaattaacgctgccaccccctgaaactaaaggagcggggttcgggtgtggaaaatcttcccggatcttcatctgcggcggcccctgccccacccccactgcccctagccatgggagcccgaataatccttgcgaagagaggataattaattcaaaaaggccacatcctggggcctcggccctttgacaagggagaggaggggaggcgggaggggaggcgagggccgagcggggccgcgaaggaggctgttggaataatccccatctcagggcaacatctttccagccctaattagactccggggcattatccctgcatgcgttgtcgatggcggccaggaaaagggcgaggccaactttatttctgaatttggactgacttaaagaagtggcatcacatttgaagggcacccaatcgctccgttgccctcgctgcatgaaattgtatctgcttgccacttcctatctcgccgggcgcagctgggctgtaagtcattggtgataacattctttattatgccgtcgtgtttatgaactgtgcctggaaagagatgatagaaatatgcagcaatatgcaaaggcatcggggaggagggggaagggggagcaaatgttagttgccagggcaacgatggggctattttgggcatcggattttgcggatgatgaaaaccattttcctgcaacggttggactctcccctcccccttcctggaggcgataaatgcacagtgaatatttaggaaggggatggcttaatttcttaattaaaaattatgatcttttcctctctgcctcctttaaaaacggataaaaaaaatcgaagggtgttgagaagcattcttgagtggaaggcgagctttcgttctggtggaaggagatgtgtgaataatgcactcactttactgatgcctgccacctcccccatcaggctcatccaccgcctttcacctacgccgacttaactctgataaactccccaagcaaaatccccgagccccagacctcagcctaatctcaaaacctccaggtgtttataagcaagctgaattccaatgagtctcggggcaacttggcttccgacgagatggctggaagatggctccatctctgggcacagatgtccctgagaaacaaaagctcaggaccaggggctgggacgatgccctcctcctgcccctccatctgagacacaggcttcccggaggagggattcgccctctgcaggcactgggctgcttatgtaagcctggtcagctccacacccaaaaggaggcgaggctggtgcccgtctggatttgtgactgtgtcccgccatcccacgtgctgtgtctgtttccatagggtggaggagctaatgggtttcaaccttgcctcctccctgctgtttcctcagtggctctccaagtagggtcccctgaccggcagccacaaccgcagcgtcacctggggatttgtggaaaatgcaaaatgtaggggtcccactccagacttgctgaatcagaactagaggcaggttctaaggaagcccctgcaggtgaggctgatgcagctgcagggtgagaaccgctgtgttaaagacagatggtgcccaggtatgcattatcctgcccccttgcctgccacacgccctgcctcatagcctgcaggtgctcgataagtgggtgtggaatgaatggatctggggaaataatcctgcagtataatctcccaccctctggccagcctctgtgcccactgcccacctgccagcctccccagcatgctctggtgtgtgatgggagagccgagggccgtgaggacacagcaggtgattttccaggctcgcaacccaaggtctggggttggagagggatgactcatggcagccttttttcctacttgtctgggcctctgtgactggctggcacccctctgtcaggtgcccctatgaacaggtcacccagacatgtcactgagttctggtaccaggtctaagacatgctcctgggtccagaaccatcttgcggggacagctggcttctggaaagttccataggtgtcaaagttggaggaacagaatgcatctcattggagggtgggtggctcttgctttgtggttggaatgggttcgtgcagttaacgtgctctttctgtatctctggctttgtgacaatgagtcgtgctgtgattcccagtaccccttcctgcccactccctccaccagaaggaggacccctgaagatgtctgtgggccagttttgggaggttctttgggataaattaggagagcaggtggctggtgtcttcagctgtaggctcttcttgtggggatgtcagttatcagaacattattactctgagtctgaagagagtaaaatgatttatgctttcttttgaaaacaaacttttaattgcttatcagccaagtaatacattctcatgtagaaaaattgaaaaatatagaaaggtatgaagaaataaagtatctacagttttcctgtctggagataaaagataatctttttctgccttttagtttttctctttatttttacagacttgagatcatatcgtattctgctttttttagctatcatcataatgtgaacatttttccatttccttaaatagtctttaatacatcctttttttagtggctgcataatattttatagtgtggctgtatcatagttaagcgtttttttttgaataaatgattttccatgtctctttcaggctatggaagtggcagcttgtgattttaataccaaagaaagcccagagctcagagagaggcagaggtgagtctctttgtgtttgacgcctggcatttgagttgtgctgaaggaagagaagccaatccatcactggggattgaagttagcttctgtggtgacattcatgggtgagagacaaaatcacttcccgcagggcaagtggcagcatttggcatttcgcaggttaccagtgaggtaatggagtcaaatagaagttcactggaagcttctttttaatgcccttgaatgggctgtcaaaggaggaagaggaagagctgccactctgccaagacccgccctctgcagagccctggatacgtaccaactgcccctcaggtgcagtaggccagcaggctggggccttgtgctctttgggtaggtggacctgctggcagggccctccccactcctgtgggggagaagcagagatcagcctggagtcttgggtaatatttctgctccattttccccctctattttggggtccacacaccatgaatgagagtggctgaaatgaaaatctcgaatgaacggtatgaaggtcagcccacacagcgaggtttcccgcctgctccactctgtcctctctccgatgacacctcaaactttccatgcttctttgcagctcttcttttgcaggaattggaacttgccacttgtttccaaagcccttccaagtccactcccttcttcccatcattcccattacagccagctctaccaacagggaaccccaaaggccataggcgtggttaagcaatactcgaaccatggggcctcttttgtacaaagttatttcggcagaatttattgcagcataagtgtaaataccccatgatcctctggggcaggggtctctgcaatggcattgttgacatacgggaccagataattctgtgttgtgaaggcccgtcctgaacattgtaggacgttagcagtgtccctgatccctacccactagatgccagtagtagggtgccctgatccctacacactagacccactcagtcatgacaaccacatatgtatttcttttcttttcttttttttgagatggagtcttgctctgttacccaggctggagtgcagtggtgtgttctcagctcactgcaacctccagcttctgagttcaagcaattctcctgcctcagcttcccaagtagctgggattacaggcacctgccaccagacctggctaatttttgtgtttttagtagagacagggtttcaccatgttgcccgagctggtctcaaactcctgacctcaagtgatctgcctgccttggcctctcaaagtgctgggattacaggcgtgagccaccgcacctggccccaaatatgtctttcaacatcatcagttgtcccctggtcatgcccagttagaactgctgatctagaacaccatttcccaaaatgtgttttgtggaacccaagtttactggaatgccagtgagtactttctgaaaagtgaggtcctgaaatcagcagaatttgatcaactgtgggctgaacacagttaaaagatttaacagggctctgcctccatttgctttggatcgcttttctcacttctcttctgttctttacccggctttcagcagagtgtcctctcctgtgattctttctagaacatcttcatttcttcaggggttttatttttatttttattgttttttccttccacttctctgcattattccagatcacaaaccatttcctcttatctctcctgagctcttgtatctctgatctattcttttgtttcatataggttcttgcctttaatttgagtaaagactttggccacatttttcatagttcagtggcaacatttttggtgatgtactgtgaatacctcatggccctgctgcctggaacgtggcgggcacagcttgtctccacatctgcttcctgctctgcctgaacctctccatagcccccctgccctcaggccacagcactttccaattctttttttttgagacggagtctcgccctgtcgcccaggctggagtgcaatggtgagatctcagctcactgcaacctccacctcccgggttcaagcaattctcctgcctcagcctcccgagtagcagggattacaggcacacgccaccatgcctagctaatttttgatatctttagtagagactgggtttcaccatgttgtccagctggtctcaaactcctggcctcaggtgatccacccgccttggcctcccaaagtgctgggattacaggcgtgagccaccgtgcctggcctgcactttccagtaaaatgatgtcattctaaggataacaagccatgtttgtccaacagatgacccaacatcactggggaagaaaaaacaagtgtttggcattggtggggaatcatttaagcctgtctgtcccattgctgagtctcggagaccaatacctagagtgtttaatgatggtgcggcttgagaacaacaggtgtggctgtcagagaggatcatgcccaaagaggaacattctcgatgtggaagttgggcagatctgcccagattagtgactcttcaagagtggaggagcacagcttgtttatctgtgtttatgaagggctccagagtagacagttcatgtatttatctctttagttcttatcacacatgctttccaggaggtgcaggagagaagcgatagcgtctactgcgtcttttgctagacaaggggagaggaagcatgctgtatgtatggagatacttatttaggttataaatttaccactcacagtctctaagttggattgcccatcggcagtgatttgctctgttacagtatttagttttgtttcaaaagccattggtgattttaactctctccctccttgtgggctctagtcttaaatcctacaggactgacactaaattcgtcacctttcttctccttccctccatttctccccacagtttccttcacatggaccacattgttaagagtagcagctcacaccgggtgaggtggtttttgcctataatcccagcactttgggaggctgaggcaggcggatcacctgaggtgaggagtttgagaccagcctggccaacatggtgaaacctcatctctactaaaaatacaaaaattagctgggcgtcgtggtgcacccctgtaatcccagctactcgggaggctgaggcaggagaatcactcgaacctgggaggtagaagttgcagtgagctgagatcgcgccactgcactccagcctagtcaacagagtgagactccatctcaaaaaaaaaaaaaaaaaaaaaaagaaaagaaaaaaaagagtagcagctcaactcttaggttatgagacttggagtcactcattgtctctactccttcaaactctagacattatctgtcatcatatttattgtctttttccttccaaaatggttctcagcatcatccccaaagcccctgcccagacaaaccacagaaatgctgcaggcaaaaggataggtgtgagaacgtatggcagggttatgtgacttagccaggaagagttggtgggcgttgatgtccagggaagcaccctctggggaaacagctttctgcctgagacctgaaggaccagcatcgtaggagttcggcaacctgggtttcctccctccagcctgttcccacggtccttcagcctggtcttcctcacctaaccctttgtggcagttttctggggctcctgtagccaagtaccacacaccgaggggcttgaaaccacagaagtgtatcctctcacagttcagaaggccagatgtccaacatcgaggggttggcagggtcagttccttctggaggctgtaggggaggatctaacccatgcctcttcctaggttttgggggcttccgacaatctttggtgtcctttggcagcctgcagctgcctcccgttgatatctgctccatcttcacatggcctccgcatgtgtgtgtgtgtgtgtgtgtgtgtgtgtgtgtgtcttctcttctttttattttcaaaggacaccagtcatatccaatttagggcctcctgtagtccagtaggacctcatcttaactttcattacacctgcaaaggccctatttacacagtaggccacattcacagattctgaaccttgaaccatgaattctggtgagacacgattcaacccagtacacccttgtttaagaaccgacccaagagactgtttgaagctgtgcaatgaatcccagttcctggatatcaagtccaaacttcctaggcaggcttttacttatttatttatctatttattttttgaggcagcgtctcactttgtcccaaggctggagtacagtggggcaattatggctcattgcagcctccacttctcgggcttaagctatcctcccacctccgcctcctgagtagctaggactagaggtgtgacccaccatgcctggctaattttttttaatgtttttgtagagatagggtcgccctacattgcccaggctggtctcaaatttctggtctcaacggatcttcctgctttggcctctcaaagtgttgagattacaggtgtgagtcactgtgcctggcccaggcagagtttttatttttatttttatttttttccgagatggagtctcgctctgtcacccaggctgcagtgcagtggcatgatcttggctctctgcaacctctgcctctctggctcaagtgattctcatgcctcagcctcccgagttgctgggactacagatgtgcgccaccatacccagctaattttgtattttattttatttttatttatttatttatttatttatttattttgagacggagtctcgctgtctcccaggctggagtgcagtggtgccatctcggctcactgcaaactgcgcctcctgggttcacaccattctcctgcctcagcctcccgagtagctgggactacaggctttcaccaccatgcctggctaattttttgtatttttagtagagatggggtttcaccgtgtttgccaggatggtctcgatttcctgacctcgtgatccacccgccttggcctcccaaattgctgggattacaggtgtgagccactgtgcccggcctctaattttgtattttagtagaaatggggtttcaccatattgcccagggtggtctcgaactcctgacctcaggtgatctgcccaccttggcctcccatagctctgggattacaggcgtgaatcaccgcacccggctaaggctgagtttttacaaacaccattccgatctatggactcacccttatatcccaccacccccaggaccatcttctcagtcgagctcatgttcccggccctgcccatgcttcttctggtcactcctcctacccttgttgaaagatacattgcccctgccctggcgtacccctgtggtcctcagctctggcctgtcttttccacggctgcaccaaggctctttgcctgagacgctctgttcccatgaggttctcttggcctgtggacagcaggagttaggaagccccaaggaattagcacctccagggagcagcccttatccagtgacttgtgggagtaagtgaataaagacctcatctttcttgctcttctggtgagataattctgaggcgcatggcaaggatgccattttccagagttctgcagtgggattaagctccgctctctctcggaggagacatgttgctacctcacccttttgaggttgcttcaccttccctgccccacttaccccctcccctgcaggtgcttcccatgaccacctgccacatccacccccagaaaccctgcagcaggctccacttcagtgaggatcccagcctctcatactgctttctgcacttaaaatgcctattcacggctgatatcaaatgtatgctccaaaccagttccacttccttctccacactttctaggatgacgtcaacctgcacaatttctcttttctcagaaccgtgagtgccacaagagtcggaactcctttggcctttctgctgctttttggctttgtttgatttctctttcacagagaccatgttttttgcatctcatgtggagcacgtcaaacaacttcctaaaatttccccagagctcgtatagaatctgtgcttcctccaagtctgcaaaattctgttcctttttccttgtcctgtgtcacctttttaccgtgggcttattgtttttcttctcttgtcttttttcttttctttctttttttttttttcattttttgagccagagtttcgctcttttacccaggctggagtgcagtggtgcaatctcagcttgctgcaaccttcgcctcccaggttcaagcgattctcctgcctcggtctcccgagtagctgggattgcaggcatgtgccaccacaccctgctaatttttgtatttttagtagagacgggattttgacatgttggccaggctggtcttgaactcctgacctcgtgatccactcagctcggcctcccaaagtgctgggattacaggtgtgaggcaccgcacctggccttccttgtctttttattcattcttgcaggaggaaagaaatttccagagccaactgacatttaccatcatgtctatttgctgaaaaagaaaaacaaacaaaaacaaaaccctactggcctccctttcttgggtctgcagtggggcagccgttcttggcagggtcctggggtctagttgagtttttccatgtggttctgctgtattcaagtaggattttctcccacccctttccacttgatgacaacactcagaaccaggtggattgcgtggaaccgtccgagcctccggctgctctggagtgcaggtagcctgccacctgctcctgctctgactgtggtcactggagccatatccacagcctatttgtggttctgtgctggttttctctttgatagactattttatccaagatgtgctaggaatcacagaccaaggctgaggctgtggcttctgcaaaagtttgttaattcctgctcttcccacctcctgcttgcccaataccatcgagaaagagccagagagaaaaagggaaatcccctccacactgctccctgcatcctggctcctcaacttgctcatcctcaggccccatgaaagctgcaggggatgggagcacttgggattgtgaggaggtggcagctgcagaggctcttcctcatggggtgtttatgcaaaggtttgtgccccagttgggtgtgggaggacacacacgaagtggtggccagacccctgtcagcctctgggccctcattaaaggccggtcctctctggctgtcttctcagccccttggccttatgctttggtgcattcatgtttcttaatagtgtaaggtgaacaacagtcttggtttgctcaggactaagaggatcccccagatgcagggtcttcagtgctaagttggtgaccctggtagttaggaagcattattattattattattattattattattattattattagagacagggtctcactgtgtcacccaggctcaagctggagtgcagtggcacaatcatggctcagtgcagcctcaaacccccaggctcaagcgatctacctgtgtcagcctcctgagtggctggaggcatgcaccaccatgcccagctaatttttttgcaccactatgcccagctaatttttctgtagagacaaggcttcactatgttgcccaggctggttgtgaatgcctggcctcaagcaatgctcctgcctcagcctcttaaagtgttgggattatgggcatgagtcactgtgtctggcctggatacgtgattttttttttttttgcattgacacagtcacagctcccagcctatgctcagtatttttagctagtgtccttctctgtatcctcttggctactcacttggtttaaatgaatatattatagatgatatatctaatataaccaatgcaagtaattttctactctcttaatttttgtacacaaaagtcctactaaaaaggcttgccacatccctcctaaactagagagatgtcactgacaggcatgttggggagagggtggacaggccctgatgagtggcatgtcccttgagtccccaatagctctcaagcagacagatgccattcttcccggctgctcccctcggccctgctggcttttaggagaggcatgccgtatgggtgggaagagagggggcttctgggtgggggtggggggggtcccacacatgtgcttctccaaaaagcatccccgtggagtctgctggcccaactttctgtgatgcacctcagacattctctaatcacaaggcttctatttgtgttattatttctatatttaattaaggtatatatacattgcattttaaaaacctggattcaggccaggcacggtggctcatgcctgtaatcccagcactttgggaggctgaggtgggtggatcacctgaggtcaggagttcgagaccagcctggccaacatggtgaaactccatctctactaaaaatacaaaaattagctggacatggtggtgcgtgcctataatctcactacttgggaggctaaggcaggagaattgcttgaacctgggagatggagtttgcagtgaaccgagattacgctactgcactccagcctgggtgacaaagcaagactccgtcttgaaaaaaaacaaaaacaaaaaaaaaacttggatctggtttttaaagggtttgaaaacctgattatttcaagagaatgtgtgatgagccctctgtgcagtgagggaaactgtagctcatcctgtgggtggaactattaccttcaattcaatttatttatattattaattcggaatttatttttcgtagagtctggtctgtctggatttcaacaggctaatggccagaaagaaatcactgtctactgaacagaagctagtttacgtcctgataaatagaaagatacagaagggtgttggcttaagagtaagtgacacccccaccttcttcaaccctctgcacttctcagtctcattcctcagacaaccataagtaacagattcctgaataccctgaatatccttccagaagttgtgtatggatacataacaaatatctgtatatattttttttgcacaattaggatcatactacatctacagttttaatccttttttttcactctataatagatcttggataatttcatttagctgtagattgatttcaattgtattgtaatagacacagcattccagtttatgggtcagacctgatttatttatttagtttttttttttttaatagtaactgttagaagtgctgctgcattgcacagctctgcacgtctctctctgcagttgtgctggtgtatcatgggggaatactctcggatgcagagtcactgggttaaagaattaaactttgattaaacattcatcaaagttatgagagcaacaaatgcacaatattaccaacgattaaaaggtaatttaggccgggcgcggtggctcatgcttgtaatcccagtactttgggaggccgagggctcgtaatcccagtactttgggaggccgaggcaggcagatcacttgaggccaggagtttgagaccagcctggccaacatggcaaaaccctgtctctactaaaaacgcaaacattagctgggcgtggtggcatgcacctgtaatctcagctacttgggaggctgcggcaggagaatcacttgaacccgggagattttagtgagccgagatcgcaccactgcgctccagcctgggcgacagagcaagactctgtctcaaaaaaaaaaaaaaaaaaaaaaagaaaaaggtaatttagacaggcaattagtgcctgggacagccacatcattcatctaggtgcacctcactttcgaaatccgtttcgcaccttaggtaactgaagcagaacaggcagaggaggatggacaattctgcctggtgggggttggggtattcagacatgaacaagcaaaagtgccccagcaggcagggtgggatgaatgggaatccaggagtggtaatatttggaacctgtgtgtcaataaaatgttgatctttggaatgatttccccatcgacttgtaagacatcattgtttctgagatgctttaacttcggttgatcttttttggtataaactttctattttgaaataattttagatctatctataatgcaaagatgatgcagagagttcctgattctcaactaggagcaacgtcaatttggcaatgtctggagacactcttggttgtcccatcctgggatggggtgcggttcttcctggcatcttgggggtagtagaggacagggaggctgctgaacgtcctatggcacacaggatggccccacaacaacgaatgatctagcccaacgtggcaatagtgccagaactgagaagtcggcccatacccttcacccagcttctcctaatgtcagcatcttataataaccacagcacctttattaaaactaagaaattaacattgtacgattctatgatcactggctttttttaaacctctgtctgtctacttaggctgctataacaaaatgccttagactggataatttataagcaacagaaatttcttgcttacagctctggaagctggaaagtccacgatcaagttgccatcagattctgtgtctggtgagggctcgctcctcatggatgtcaacttttgtgtactcatgtgacaggagtgaacaagctccctcgggcctcttttattattattattattattattattattgagatggagtctcgctctgtcgcccaggctggagtgcagtggcgcaatctcggctcactgccacctccgcctcctgggttcaatcaattctcctgtctcagtctcccgagtagttgggactacaggcgctcgccaccacacccagctaatttttgtatttttaatagagatggggtttcagcatattggtcaggctggtctcgaactcctgacctcaggtgatccacctgcctccgcctcccaaagtgctgggattacaggcgtgagccactgcacccggcctcttttattattttttaatttttaaaaatttattttagatcggggttccatgtgcaggttccttacatggatatattgcatgatgctgatgtttggcttccgttgaaactatcacccaaatagtgaatgttgtacacaatagatagtttttcagtccttatcccacctccttttggaatccccagtgtctattatttccatatttatgtccatttgtactcattgtttaactcctgtttataagtaagaatacgtggcatttggttttctgtttctgcattaattcacttaggatagtggcctccagctgcatccatgttgctgtgaaggacataatttcattcttttcatggctgcatagtattccatggtgtatatgtaccacgtttctttatctaatcccccattgatgggcaccttggttgattctatgtctttgctattgcgaatagtgccgggaaaaacatgtcagtgcaggtgtcgtttcagtagaatgatttgtcttcctttgggtatatacccagtaatgggattgcgggttgaatgataattctacttttagttctttgagaaatctccaacctgctttccacaggggctgaactaatttacaatcccatcaattgcatatttgcattccctttttgctgcaaccttgccaacatttgttattttttgaccttttaatagtacccattctgactggtatgagatggtatctcattgtggttttgatttgcatttctctgacgattagtgatgttgagcatttaaaaaatacgtttttggccgcttatatgttttcttttgagcagtgtctcaaaagacactgtgtgtcctttgcccactttttaatggagttgtttctttttttcttcttgatttgcttaagctccttatagattatggacatgaatcctgcgtcagatgcatattttgcaaatttttctcccattctgtaagttgtctgtttattctgttgataatttatattgctgcacagaagctccttagtttaattacgtcccaattgtcaatttttggttttgttgtgtttgcttttaaggatttagtcataaattgtttgcctaggccaatgtccagaaaagtatttcctaggttttcttctaggatttttataggttgaggtcttacatttaagtctttaatccatcttgagttcatttttgtatatggtgagaggtaggggtcaagtttcattcttctgcatatggctggctagttttcccaataccatttattgaataggatgtcttttccccattattaatttttgttgactttgtcaaagatcagttggttgtagttatgcagctttatttcttggttctctattctgttccattagtctatatgtccatttttgtaccagcaccaaactactgtagccttgtagtgtagtttgaagtcaggtaatgtgagcctcctcccttgttccttttgcttaggattgctttggctatttgggctctttttcggttccatatgaattttagaatagttttttctaattctgtgaagaatgaccttggtaattttataagaattgcattgaatctgtagcttgctttggtcagtatggacattttaatgatatcaattcttccaatcaatgagcatggaatgtttttctatttgtttgtgtcatctatgatttatttcagcagtgtttggtagtcctccttgtggacatttttcacctacttggttagatgtattcctaggtatttgtgtgtgtatgactattataaatggaactacattcttcatttgtttctcaacttgagcattattggggtatagacatgctactgatttttgtatattggttttgtatcctgaaactttactgatcatttattaaagtttaggagtcttttggtggaatctttgagttttctagttatagaattatatcatcagtgaagaaagataatttgacttcctcttttccaatttggatgccttttatttctttctcttgcctgattgctctggctaggacttccagtactacgttgaataggagtggtgagagtggacatccttgtcttgtttcagttcttagggggaatacttccaacctttgcctattcagtatgatattggctgtgggtttgtcataaatgactcttattgttttgaggtatgtacctttgatgcctagttttttgagggtttttatcattaagggatgttagattttattgagtgctttttttctgcatctattgagatgatcatatgatttttgttttaaattctgtttatgtggtcaatcacatttattgattttcatatattgaaccatccttgcatccctggaagcaagcccatttgaacttggtggattatctttttgatgtgctgctggatccagtttgctaatattttgttgaggatttttgtgtctatgttcgttagggatatcgtgatttctttgttgttgtatcttggcatcagggatcttttataagggcccctaatcccatccatgatggcagacccctcacaatctaatcatctcccaaaggccctacctcttaaaactatcacctggggattaaatttcaacatatgaattttagggagacacaaacattcagaccatagcaccctcttaccacatttttaggtgtgtagtatattattggtaagtataagcacaatggtgtacagcagacctctagaacttttcatcttgtgcaactgaaactttatacacactgaacagctgttccccactttcctctccctagctacaggcaactaaccattctaccctctgtttatatgagtctgactcttagatacctcatatgaatggaatcatgcattgcttttcctctgtgtctggcttattttacttaccattatgtcttccaggttcatgtgtgttgttgcatatggcaggacttccttctttttaaaggatgaatgatattccattatatttaccatatttattttatccattcatcagtaaatgggcagtcagtttacttccacatcttggctattgtgaataatgctttttttttttttttgagatggagtctcactctgttggccaggcacgatcttggctcactgcaacctccacctcccaggttcaagcgattctcctgcttcagcctcctgagtagttgggactatagtcatgcaccaccacacccagctaatttttgcatttttagtagaaatggggttttgccatgttggtcaggctggtcccgaactcctgacttcaggtgatccacccacctcagcctcccaaagtgctgggattacaggcatgagccactgcgcctggcctgctgttgtgaatagcactgcaatgaacacagaagtgcaaatatctcttcaaggtcctgattttggttcctttgaatgaatacccagaagtgggattgctggatcctatggtaattctatctttaatttttcgaggagcctccagactgtcttccacagcagctgcaccatttcacattcccaccaatcgtgcacaagtgtgccaatctcttcacatcctcatcaacacacattattattatttttaaaatggctgctctaacagatgtgaggtggtatttcactgttgttttgtctacgtgattagcaatgtcgagcatcttttgatgttcctgttggccatttgtacatattctttgaagaaatgcctgttcaagttcttttcctctttttaaaattgggttatttgttttttgctactgagttgtaggagttccttgtattattatggatattaaccccttatcagatatgtggtttgaaaatatcttctgtctgggcgtggtggctcacgcctataatcccagcactttgggaggccgaggcaggtggatcacctgaggtcaggagtttgagaccagcctggccaacatggtgaaaccctgcctctactaaaaataagaaaattagccaggcgtggtggcgggcacctctgttattccagctacttgggagcctgaggcaggagaatcgcttgaatccaggaggcgaaggttgcagtgagccgagattgtgccactgcactccagccggggtgacagagtgagacgccatctcaaaaaaaaaaaaaaaaaaatcttctctcattccataggttgccttttattttttatttatttattttttgagatggagtctcactctgtcgcccaggctggagtgcagtggcacgatcttggctcactgcaacttccgcctcctgggttcaagcaattctcctaactgagcctcctgagtagctgggattacagttgcacaccaccacgcctgactaatttttttgtatttttagtagagacagggtttcaccatgctggccaggctggtctcgaactcctgacttcaggtgatccacccaccttggcctctcaaagtgctgggattacaggtgtgagccactgctcccagcctcatagattgccttttaaaatttatttttcaattgacaatgaaaagtatatacacttatcatgtacaacatgttcttaagtatgtatacattaaagaatgtctaaattgagctacttaacatatgcattactcatatacttatttttttcgtgagaagacttaaaaagtactctcttggcaattttcaagaatacaacaggcttaataatattccattgtgtatatataccacatttaaaaaaattcactcatccgttgatggacacaagttgattccatattttggctactgtgaatagtgctataataaacatgggagtgcaaatatctcttcgacatactaagtttatttcctttgggtatgtacccagtagtgggattgctggatcatatggagttctatttttaattttttgaggaacctcctactggtttccaaaatggctatactaatttacattcccatcaacagtgtgccagggcttccttcttccacatcctcaacaacacctgttatcttttgtcttcttcataatagtgattctaacaggtgtgaggtgacgtctcattgtaattttaatttgcatttccctgatgattcgtgatgttgagcattttttcatatacgtgttggtcatttgtacttcttctttggagaaatgtctattcaggtgctttgcccattttttaattgggttattagttttcttactattgaatagtttgggtccttacatactttttatgttaatcccttgccagatgcagggtttgccggtatcagttgcttcccaagctgtgctggctacgtgaagagggacccagcctgctcagggaggaggcgccagacacctggagtgcagggtcccaccttctctccctctgtgggtttttcgctctgctgattgtttccttgttttttttttttttttttttttttgagacagagtctcgctgtgtcgcccaggctggagtgcagtggcacgatctcggctcactgcaagctccgcctcccgagttcacgccattctcctgcctcagcctcccaagtagctgggactacaggtgcccgccaccatgcctggctaattttttaatgtattttttagtagagacagggtttcaccgtgttagccaggatggtcttgatctcctgaccttgtgatccacctacctcggcctcccagagtgctgggattacaggggtgaaccactgcgctcggctttgccacgatcagcttggctttttaaaactttagttttgtttttattactccatacctcttcaactctcagtaagtcactagtggcctgaaacaaaatgtaagtgcgctagggagcttcctctgtgggatgagccattttataacacaaaaccttctgccacacggatcgccttttcatcattaatttgtctggtaaatatcacattagtccaggctttacaaaatcagatactagatgtacttcccatgaaaacatgaacaaatctgcatttggaagatctgggtggcaggacacagaggtgagggacctttccggagggtccaagtcctccctctggaggacagtcactatctagaactgtgtctacaggaactgttttcatgcatccagatgtggacatgaaggaccagcccacggtaatgactggctaagtcaattccatacatatttactgagcattccccatgccctgggcgctgagagggtccccctaggaagcaggtgcatcctgcccttggtgagattaggcttctgtcgtactcagtcagtgcaatatcgtcaactcccaagacccctacctagccaggtagaggagaggattggagagaaatcattaagtcacttcagcccttttaattagctttttccagtctcaagtgctactgcaggtatgagggaagtgaagccctgagcgctgctccggaggatttggcatgcgagtgagtgggaaagaaagaaagctccttcaatgactgccgtggaaaaagtgccccggattggcgcatctgaagctgacgtgcgcacgggtcacctgggagtcctgtcaaaatgtaggttctgatttgctggattggggtgtggcccaacaacctgcatttccggtttgcccaggtgatgttcatgccactgatcctgagccacactttgagaagccaggtaaagccccatgatcagcacgggagggggcacagggagctgtggtgatctggggacactgcaggctgctgggggctgccttggaccttgaaggagagacaggttggaggcagtagcagttgtggaggccaggatgtcacagggcaggagtggggctggaaagggcagaggggggaggcccccagcccctgcctaggctgcttttattctgtaaagaggtttttactctagaccttccattttcctggaagtgaaggtctgacatgcattgatccagaaggtaaaaaccgaaggatgggtgaacaggcacactcttcctcacttcatttaactggaatcaaagcaacagggaagtggaggtggggtgggagttggggagaggggtgggggtgggagaagggctttcccaggcaggcaagttcctgatgggtggggagtggatagggagcagcaggtggcacggggtttctgtgaccgggacctgtgatcctcttgcctttgggcagccagtgggtccacaagccatccaagggcaaagtttgtgcttttagaaatttctttccgaggaagcgattagccagccagacctgttgtccttttgcaagcagcaaattacccaggaaaatgtaattacccatttgctttgttattagtgcacagctaagaagattgaagcaatcgcccctttcatggtatttcaaagcttactcacacgatgcatccctgatattaaacacaatgagacttttttgaattcaattaagcatttgcctactgtgactctttattcattgcaaattgtctcagtaaataatcttcatcaaaagtcagaaccaatccccattagttgtttagattaattaatgggtccccctggagccacccaaatcaattcaatttgaacgtcaacaacttggcgatggagtttcccaggttggcattaagacaatattaaacctgcaataagtcacatttaaaatgttaattcagagaagctctccatttagagcatttaattaaatccttaaataaactgcctgggctcagtaccagatggttctgcgttttcatggcagcacaaaaccttgaagtcattgtgggaagtaatatcggaggcgcggtgaagacaaccaggatatatagagtaataaaatctaatctcgtttccagcggggagattcagtgtatgtacacaacccgggctcaaattgtaagttaattacattaaccccagtgtactccaggatctgagcagccagagatgaaattagtctttttcctatcataagattcttttcaacttcactatattaatttttagccaaatactcactcataaggaaaattgaagttaatgtaaccaaagataaagtaaggcagccttaatattctgaagggattatggagacccgtgaaaatatactctgcaaatatcatcgacgtggagtggatttatggagttgggcgggggagaagaaatgaagacgccaagaagaccctcgtctctgcccattttcccccctgccagcctagggttaataaaggacctaatctaggaaatgtagtccttggagcaaacagcctcccaagggtggtggagggtgctgggggaggagacagatggcctctgagagcagttaggccttcatgtcaggggcaggtgaggggcccaagtgtcccctggcagcaggattacctctgtccgccccctgggtggcccagaaatctccatggttcagcctcttaatctccctactctgaggagacaagtcacacttctcggtctttcccttgggatgtcaagagggaccactggctcctctgtctgccaacccggagaccctcaggtagcacccttagttactgcagtggtcccgtggtgactgaagatctaacgcaaatttcttttaaaacagcttcctccaaaagtctatcaattctccaacaactaagaaaaactacacatcacccattcagtcttgggagcctgcattcccaaggggctgtgtctcccactgcagtcccatcaccctgccatctggggaaagaaagcaaaccgaaaaccttgtgagtttgtctcaaaagcatttttctgctctgatcattccaagtgaagcagtaggaaccgaatttctgacaacctcctcctaggaaacgactctgtcgtgacccggcactcaccttcacttgaccttctgtgatcctagccctctgcccgatgcttggtgccatcttaccctcccaaactggaatatcccgaacccctttgggccctcctcctccattctggtctttggtctgagagaaaccatcacagcctcagggacctgattctgccgggcctctgggctactgagagtccacttagcttccttttctgtcccgaatgtcactgttgtgcttgtcacttaagggtccccacactgaggtggctcataggtttcatctgaatgccaactgcaattgattggtagtggttgttcacagtgttaagaaggattctgagcctgaatccagtctccaagaggaaaagaacactgcagatattagcaatacatttcaagtgtgtgtgtgtgtgtttacactatgaatactttccaatgtttttaaatgaaaacatgttaatggctataccatcatttattttaattccatttcttgtttttgccttttttttccccttcactactaagggtaaatgacacatctttgtacacgaacctttgaatgtctgaccctttgttcaggtaaactcctagaaagggaagcactagaccaaagattgcaaacaaagaccaagttatttaaaagttgagctctttattatgaccatatattcccacacatgtgagtgccaggatgtttatttcaagaaaaaattaatacagcccaagttacaaatattaacaggcagggtggctcccaccaggcacctggcaaaacctcagcccagaggggcgagaggagctgattctgggttcattctggaacggcgggggtggccctgtttgcaggtccctcttggggtccatgctgtgcctgggttcactttggcctgaaatgaaatgaccaattctttgcagtggggcgtggacagttaggatgctcaatcatctcctcagctcgaactgttcaaagtgcagactttgagcagagcacagacattcctaattattcaaattaagagatcacacatgagagcaagatttaaagcagtttaagtaggggattattgtgttctctgtcagtatcttcattttcataattcctagtcatagaatcaaagacattagagctggaaagaaaacaggaaacaggaggttgaatccagctgtcttgatggacagaggaaatgaggtgctcagagaaggtaagtggtttaaccaagccacacagccagttcgtggcaggccaaatcctgtttcagtggtcttaccaccacagctcacttccagccacccctgcttacacatactcacctccctggggctctgctggtccctgggcttcacactcagtgagtccagagccctcccttctccgtacacttttggctgtggctacctcactgcctattctgaagcttagagcaatgttcttgtgattttttctgcagcgcatgtctattgcaattgcctccacatgtctctcattttgctcttccgcctagttccacgtggcaaaagtgagaagagatcaatcctggttatgctgtgtctacatccatatggtatgctcgctctactttttttttttttttgagacagagtctcactcttgttgcccaggttggagtgcagtggtgtaatctcggctcgctgcaacctctgcctcccgggtttgagcgattctgctgcctcagtctcccaagtagctgagattacaggtgtgcaacaccacgcctggctaatttttatatttttaatagagacggggtttcaccatgttggccaggctggtcttggactcctgacctcaggtgatccacccgcctcagcctcccaaagtgctgggattacaggcgtgagccactgcacctggcctgcttgctccactttttaagggagataataaaacaggcattgcctgtgtttggtttgagttagttttgcagagagcaccaccttcttgccccacgtgaaaggaaattgcaggccctttgcaacagcagccgaactccgacctcagctgcagtaactaagatgcccttgtctgccagaaacactttcctgagtgagccagttgttctggaaagagggcagcaaagggactgagcagggaaggaggggatgaaaagcccggctcaaggctgggaaggaaggagagtctgtgcttggtggatggggtgggaacagctggagggtgagatgcaggaatgcccatggagcactcacctcttgcaaggtggggagacactagtggaaggcaaaagggggttattcttgtaccgcccaaatccaggacatctgtagaaaccgctcgtgtctgtgggtcaggactgatgccaggagagcacccatgaaaagtagagaagctgggttcttgggcagcgggaggtgggtctgtggtcggtgtgccctatgaggggccagcctgttacctcctagcattgcacagggctgtgcagtggggcgtcaggcacagtgagagcccagttgcagaattatcattgatacagacaccaaaagtctgcacttcgagcagttcgagatgacaagattgagcgtccttaccatccatgccccaatgcaaagaattggtcattccatttcaggtcaaagtgaacccaggcacagtgtggcccccagagggggaccagcaaacagggctaccctggctgctccaggaggaactcagaaacagcttctctcatcccactgggccaaggttttgccaggtgcctggtgggagaggagctcgagttgccagcagagccccctgtctgtcatctctgtgttgggctgtactaactttctcctaaaatgcacagcccagcacaccacggctggctctctaggctgtcaggacatttgattccgacacggctcccctgggcggccctgccaaggctccgtctctgcttgaaggtggtaactgttcccctgctacctcgtcttctccagtgagacgcattccctgcaggaacagtcgtgccttccgcagcctgcaccttcatccatagccagggaagctgcacagggcccgcccttcctgggccacatcgacccctcagcttgcagcctgtgcagtgtcagtgcgacaatcacactatcttgcagccagcaagcgccgggctgggaaacccaggtacctgcaaatcagatgcttcccaaggacaggcaggcagctatgatggaagaggaaaagggaggggccgtcctaccaagacacagcagccctgagacccaccgcagtaaccacgggcctgaaccaccatggagatggggaggtgccttattatccttctcgccctctctggggtggtcctcatgacctcagcctggctatctcataagccagcagtatttgggtcagctacaagagaggccagaggcataggtgttttgatttgtgcattttgttttgttttggaagtacagaaatggcatgagccttgaacatttttctctcctcctttctcaaagagaacagtaaaagcattcatcgcgtggccggctgaggcttgagcttgctggagaagtgaggtttctaaagagctctgccccactgacacctcaagctgccctgactgctcctccctgagctgagaggtgccatcagctgtcagacctggcctcagggtaacaggcaacgaaggcacaggtgagcagttggtagggaccacagaataaaacgctgcatgatttttatgaatttagcctccattccgttttttcctgcctgcccggagagcagggccacgctctcctctgagcaagaatcaggggcgatggtgggctttgcggagagccctgaaagcttcctggcggggattgtcacccgaggtgggatagcttttgctttggagcagtggtggggtgtgtacttgctgggggcaaacttgcctagagtcgctagctaggatcactcctccctgttctcacttttcctccgccctgccatgctttctgttttgttgcgccctgggccagctgcgtcctggtcccaggtaggaatgtgttgctctcattccctgtggagtgtgattctctgggcggcagtgccactactctgtaggatgcaccatccaggatggctcttggatcttctctgcctggctgttccccagccagaggctgctttatccccaaggtgggcactgcaatgaggatccccagcctgaagcagcctccagagctgagtcagtcaacagatgttaactgggcaccttggggttccctcctggcgatggaataaacagagggcctggccgccgcctctctggggcctccagctgggggtgtctgctgattgcaggtggagttccagctccagcccatggacagcacctcaggcccctgccacgcagctagcccagcggcataggtcagaggcaagtgagtcttgtctgagggcacatcctggcatcaaaggctctgacctggaaggggctgcaggggatgtggctgcccagtggcaggatggggctgaggcagattttgggaacaggagagagtcacagagtcccttgggcatgactgaaggcagaaggtaccaaagacgagcttttgcctccaggagaggtggggacccacggaagcggcactgagccaggagcaggggcagtgagcaactcataggcctggtccatctgatggcctctggcagcagttgtctgtgctggcccagatggtcacagggaggattccacacagggtgctttgaaggttcccctcccattgttcagaggaagcccctgcaccggaccaatgagaacacaaggccctgagagggaaattgaggaccctgctgggtccacagcctggagcttttcaacccacattctgtgttttttcctctataactctctctctctctttctatatatatatatatatatttttttttttttttttttgagacagagtctcactctgacgcagactggaatgcagcaatctcagctcactgcaacctccgcctcctgggttcaagtgattctcttgcctcagtctcctgagtggctgggactacaggcccgtgccaccacgcccggctaatttttgtatttttagtagagatggggtttcaccatgttggccaggatggtcttgatctcttgacctcgtgatctgcccgccttggcctcccaaaaaaaaaaaaaaaaaaaaaaaaaaaaaaatatatatatatatatatatatatacaaaatttctttacatggttttaatgaagttagcataggttctgtgttttccctggctgctgggagattgggacagtgtcttctgtgggagaggatatgagatgatggtgggctgtgcacagtcctgggatgagccagcctttcaggacggccctgatggaagcttctggctagggtttctcaccccactctgggatcacttctgttgctactgctcagagcagagtaggctatgcttcttaagggactgcacctgctgggcaaaagttcttcccccccccccaagaagggtgccccccgacactgcccaccaaacagggacaggattccctttttagagcacaaaggatctctgacaacatggcgtggcctgtacccgtttgaggtttacgccaccagcctggtccctagaggcaaactctgctggaatctggggtgttgtccccctgcagtggtgtcagagacgcagtggccctgggtctccaccagcaaggaagactaaccctcaggaaaggttgtgcttgattgtgccttttcaaatcagcattgtgtttcattaaaataacagaaatactgaataagcagtgatcacctatagtcacttaccgatgttaggaggcagctaggatttcaggaatgtccctcttagacacaggctggtgctgccttgctctcttatgaactgccttttcagttgagctcagatctggtgggagaaaaaaaccataatgagcttttgaattagaccaagcctgacttttggccctggctctgtccagctcttgcagagggactctgtgaaaaggtgcattagacactgccagcacatggcagggacttgtagtaatcaggagtccttttctaagtgaccaaaatcccaaattcaaataaagaagaggaaaattcattggctacaacagcttcaggtatggctggatccaggtgctccaacaatatggtcaggatccagtgtctctctgtctcttgctggtctcctgtgtgttcacataattcccaggtgagctgtttttccatggtggaagctccacacttttgtctcaccaactttaagaccacctgaaagccagctatgctttcccaacaggctgttggagagactggagccaatcacagcacatgctgaatggagggctcatattcgggcaggcagctgaggggaaggtacagcagacactttctgggcccatggcctcttacccctgtgagttcaggtgtggctgtgtgggtaggtcccatctttcctcctgtcttctgactcagggctttttccatagctaagggcagggtaagcttgggagataccatgccctgggacaaccgtctgccaatgggggacaatagtctgcgcccatggagggacaactcagaggcagatcccacggatttttcagagggctcctggtgggtctgagcccctgttgcccgcaccgatcaccagcccagtgtcatcctcccattgaccacgctgatcaccagcccagtatcatcctcacaattggccacgctgatcaccagcccagtggcatcctcgcaattggccacgctgatcaccagcccagtgacatcctcacattggctttctccccacccggatctcactgccctgcccctcactccagcttcctggagtcacctcccacctacactacctgcacccaaggccttgtctcaggctctgttttgggggaaccccgaaaggcagagaggtcaacctcacctgaagcaggtgaattgagaggtattagggccttgaggacacctgagtttgaccggccaggcgtctgacctccctcagcagcaggaccctgtctcaattgttgtctcgtgaatcctcccagtgtataaagagtacaagaaaggggttggtccagcctcacaagcatttactgagcacctactgtgtgccaggcttactccctcttcacatgaactcatcatcaccccattctacagatgcagggagtgaggcctaaaatcatcaggaaggatctgaggccacacagctggtaaatggcagagcgggggctggagtccagggcctctcactccaggtgcgggctcctgtcctcgccccgctggctggtctgaggtggctcactgagctgggcgtagcttgaagcctcccttggtcccctccagtcaagactggattttcccgccagctcccagccactgtccttcctccccaggaaccttccgctgtgttttttgcaaagtcaggctctcctaactctctctcacaccccttcctgttcaggctccaactttctctgcccagaagcccttgctggcattggtgcctgtgccaagcttgctcagtgggaggtgggttcacagcctctcacctccttccctgctcgctgtccacaggactgtccaagtaaaggttcccctcaacaccaccccttccctcaaccccgtcccaggtcaccactcagaatgacagcgctaaccctttctaccctgctcaaatcccaaccctcaccttctggggctgcccctgcctgcccagatcaccttcttgctgagaaaatggaagcgttaaactctcaatcctcttcaaagctcattagccagagaaagctacacatcaaattgattttaattctccgggttctggctaacgcaatgacttcaggccacaggcggggagggcagggttatttttttgaggcttgctggtgtctctctgccctttccttctggctggctcatgattcttgcaatgtgacaagctctgcgcagtcccagggccaggacgcagggcgagccttgtgctccccaggggcaggatgggggcggagggatggaggaggtgctgagcccacagcagtctcccttcccagggccctacccagaagctgtcccgccactcataaagagcctgaaagatggaaaggatctctctcttattcttgtaatatactttgcccagaattcatgatgaaatacattttctccagaacgttttatgcagttaatggtgtaaaatcaaaccgactgttgtcagaccattctcagtgcctcccctaaccccagtatttgtgctgaagatggtgggaactcaatttgcccttccagaatatcgcagagcctggccccagcctgagcaatggcagctctccaggagcctgaggtctgaatctgcctggtacagcatcctggagagcacgtgcagacacagaagtactgtgtgccctgtgaaatagtgggccaggtaggcattctgtcccatctgtcatgtgctccctctgtgtggctgccctggaggttctgaggaggcctgcggggaggccctaggttgttccaaaccacctctataaatagccagcttcaggaattcactgggagccaggctgtttttataggcttgtatcttcgtttttccagtaatccagctgagtgcttctggacccgggcccccaccagggaactgacaaccccacatctgccacaggcagaaaacttgtgggggtcaagggaagctctttctctgccatttaagaaggaatagtgggggccggggctgccagcccgcttggctcacaacttttggactgtctggcattgtggccagcacgtgactgtggttatttggggcaagcaggggtgcccaagtccagacacatctcctcccaggcctgtccctcactgacacatctggtaagcatgcgacggagagaacactgtgtaacaggaaccaacgctgggctgtcccaggcatcctttatggagaaaaactctttctatgggatctgaatgcttctgctcttaaataatcagtgtgaatttcttctaagcagccagtgactagccaacagttcgagtagggcaaagtcaatgatggactggatttcatttctcatcagtggcatgaggggggtgaaccagggggtctccagtcccacttagactcaattccataacctcaaccaagcacctgagcacgccgggcacctggggaaccgagggacttggtaccaggagtggggcccacagggccctgtgagcgtgtggtcaggggtggggagaagccacggaggtcgaggcagggttgtgctcgctcagagaaccagatggccaaaagtcccaggaaagctggtctctatccatgctcaacacagcttttccttgtgaagggagagggaggaaagggattaccggcgccggggagaaagagcccagagccccgagggaggtgtggacagagcactcatgaagatgaggaagaggagcttgagcgcagggacagtgcacagcacagtctgcatcagaggagatgtctggggtcagacagagactgaggggcctgccccttggggcccggtggccaggacttggtgcaaaagcccccgccccccacagcctccctgctccgagcccctggccttgtgcatctcctgctctccttcctgaactagcgttgacctcacatcgcagctgcccttccctggcttcatttattcaggagagatctatggactaccgccatgaggcacgctcactctctgttcagacctgacggcggatcccgagccacggaccctggcgttctccccacagatcagctcaccttcacccttttgatgttgccacttccagctgttccagggagatgcctccttggtctagcccagccccaggcacactctgaacgcagacctcaggcagccaccccagacccagcagaggggacaccagcatgggcagcgcaagtgggcctgacatcaggaaagcgaccatccctgcctgtccctccagggctagagtcatgactgtatttgggtgtgattcagattcatgtaacagagcacaagtgacattaaaggggaagaagaagtagatgaagacatggctgaaagcagacattagccaaattcttactctaaggagaaatgaggggtgagaagccttttatccctgttgctgacttgtctccagctcccaggtaccagactacaggggtgggggtggggcaggctctagggagattctcgcttggtacccagctccacactctgcaatagtagttgatttgtcattgctgttggaattcattttttttttttttgagatggagtctcactctgttgtccaggctggagtgcagtggtgcaatctcggctcaatgcaacctctgcctcccgggttcaagagattctcctgcctcggcctcctgagtagctgggactataggtatgccccaccatgcccagctaatttttgtatttttggtagagacggggtttcaccatgttgggcaggatgggctcaatctcttgatctcatgatctgccccccttggcctcccgaagtgctgggattacaggcatgagacaccgtgcctggcctggaactcatttttaaatcatgcaacacaggactgattcccaaaacagcatccctgtgcctttgcatggccacgtcctcttgaagaagacctgtggactccgagtggccaagggtgtccctttggagcccaacagatggggctgaattccacttctgctggttgcccgctgtgtgaccttagccgagtgtctggatctgggccttagatccctcacctgttaaatgaggccagagctggccacttttcagggctgttgatgaaatgaaggagataaaagatgcaaaggagctccgtttggtgctggggacgtgcaagcatccaacaggcgacatttgccattcttagataatcactgtcattagagtgcatgcattcaagaacccacagacaagaggtggaggctccgctggggctggggcaaaagatgcttgcccaggacaccacagatgtccctaccctcacaagtgaccagtgggaagtgacggagaggaggtgtgtggcaaagccctaagggtgcctgcagcccggccctgccagagtgcggtacattgcccactttcgcaatggcatcttcaagtgggggcctccttgacacatgggcagtccccacttctggtcgcctctcccgcctttgactaatggctgacctgacatctttcagcaagtgaccttgttgcagctggtaattcaaatatctttcagtgtcagaaataataagcaccaccatgagatgaacaagcagagcttaagttaagcgcagattaatggggttttaatattcctaatttaatcactcctttctgtcacactgtgggcaacatgatgtagcagctaattatttttttaaaccatgttggggatctttcctaatcaattttatatttaacatgaatgaagggagggcagtgattaatgggagaataaatctcagcaaacaggcacaagcaggcgatcagttaaaaatacggcaggatgactttgccttctcctgtagtaaattcttcagggatgggatggggcacaattttaagtctctttcaatctaaaaaggggaaatgagttgaagatttaaaaaccattttggctgaaaagtcatgaacacacattttcattgatgtaaaacagtatagactaatcagtgtggtgacattccatacctcttacattatattctagcattatggcatttcatacctgctacaatgtatcccagtaagtatgtgttgtttcatatctgctacaatgtataccagtaagtatgtggcatttcatacctgctacaatgtatgctaaagagtattatggccttctatagttgctacattattattattattattattattattattattattatttgtagacaagtctctctgtcgcccaggctggagtacagtggcatgatctcagctcgtggcaacatccgcctcccaggttcaagtgattctggtgcctcagcctccttgagtagctgggactacaggcaggcaccaccacgccccgctaatttttgtatttttagtagagacagggtttcaccatgttggctaggctgatctcgaactcctgacctcaagtgatccgcctgcctgagcctcccaaagtgctgggattacaggtgtgagccaccctgccctgcctagttgctacattgtatactagtaagtatagtggcatttcatagctgctgccatttatagggagcatgctgaggggtgaaagacactgactttcatgtcaggaaaacgtgtatattcaaatgctggtgctgccctttatcatgtgaccttgggcctcagttttcttatcttttaaataggtgtaatgatgcccctgggagcattgtgagggctcagtgtgtggatgcacacagcatagtgcctggcatgtgcgtgctgccaaatctaactttaattctcgcaacactagaaagtgtgtcttaggctgaggtccccaggagcaggccctgggaggaggacctgcatgaaagggatttgttagatgtgccctggaaagctgcgcaatggaacagggactcagagagaccaggaggaggaggctacgcagtgcaggatcaggccaagcacaggcaaattttggagatgatgatgatcatgcccgagagatgtcccagtcagggacccaggagctaagaacgtaaaactcagcctgtcagtcacgggcaagggagacataaattcctatgtgtttccagtcctcctgccaagtggcttctagctttctgggaacaatgctcccaacaagagacccaggcaccgtctatggagtgaggacaaaaacggtgataccagcagaggtggacagtgcctgcccaggaggctggtcatttgctccgggtcacacaaagaaggcgtgagctggcatagacccctggtcaggtcaggaggtggctgggtaagatgtgaacttgcacccaaggagctatgggtccccaaagacctggagtagactccgcattctaatatcccaacccatggggaagcccttggggcagactgcaggacccctcaggacaaaggctccccacgtaagcatttctcataacaagcagagttgggcatctttgccatgttttcattcattcatcattcattcattcattcattcattcattcattcattcattcatatattcacttattcatccgtattcatccaacctttgtttagcaagcgcctcctgctggctgggcactgttgtagacatgaggcataacagtcaaaagaatttttaaaaattaattccttttctcacggagctgacattctagagggaagggatgagcaacaagaatggcaaaacacagagacagcacgcatcttagaaggtgacggtttccatgcagaaaacaaagcagaaagagcggagagccggggctggaaggagtgctctgtccaatgtgcttccagcagagcctcaccaaggagctgtaagcacagacctgaagggacctcattgagtcttgtagctttgaataccatgtagatgctgacaactcccaaactgtttatctccagcatgtcctctcttcaactccagctggtaattcaaatatctttgaattcaagagcatcttcaagaagaggtgttcttgaaaaagactattccacgcagcaggaatagcaagtgcacaggctaagaggtgggagcccgcctggtctgcgggaagatagcagggagctggcgcaccagccgcggagaggtgagctcaggccagagcagccgaggaggatgcaggcttcgtgaacaggcaagtctggatgaggccttggcttcctctccaagtgcattaaggccggagagtgacatctgattcgcatgttaaaatgctagctgtgatagtacagaacagtctatgggggcatggggatgggggaggtgcaaggagactcgtaggaggtgaaaggtgatggtggctgctccagagtgttggagatggcagaggtgggagcggctggacactgggcactttccaaggtggagttggcagcatgtgctggcgggtggatggggggtgcaagagtcttggaggagtcaagggcaagtccaggcagttggagggcgggagctgctgtcaactgagatgggaagattcgggatgtggagtagtgggaagctgagtttgggtatatcaggctcattcaacgtctgtctgagtgaaggggctgaggacacagtgggatgtgtaagtctggaattcggaggagagaccatgctggagatagccaatataggacttgtgggcatctatgtggtattcaaagccacaagactcaatgaagtcccagggagagtgaaggtggatacagaaaaaagtcgtccaagcctcgggtggctcgtggggtcagagtgtgaggagactagggctccagcgaaggagaccgagaaggagcagccaggcgggcaggaggagatccaggcaaagtggggtcctgtgggctaagggaagagaattctcaagggaaagggaagatgggcagctgtatccacaccgcagaaggaccaagtcatatgactaccgagaaccaaccactggacataccacgtggaggccactggtgatcttttcttttaactatcaaatacacataacataaaacttaccatagtaaccatttttaaacgcacatttccatggccgtaagcaccttcctaatgccgtgagatcatcagcactgttgtgttccagaacattttccttcctccaaagggggctccacacctgtcagcagtcactccccgtctccccgccttcagcccccggcaacccctcatctgccttctgcctctaggggtttgcctaatctgagtgtttcatatccgtggaatcacacaatgtagtgttttgtgcctggctcctttcacccagcgtcgtgtcttccaggttcatgcacgttgtagcacatgttggtacttcacttctttttgttctacatttgaatttaattgttaaaaaaaattgacaaaattttatagatatatatttatgctgtacaatgtggttttgaaatatgtatgcatagtgcagtgactacattgaacaaattaacacatgaattacctcataaactatcatttttctgtggtaagaacacttacaatctactcttttggcgattttgtttctttttaaggcgaatggcattccactgtatggatagaccacactgcattcacccatccatctgttgacggccgttgggctgtttctagctttgtgctgctgtgagtaatgatgctatgaacatgtgtggccgtgtctcctttcgagtctctgttttcagttctttgggggtgatccctaggcatggcatttctggtgacctgcacaacgggagcttccatggggtgatggggtccatgcccaggctggatgctgggagagaatgagaggagaggaatggagatggcaagggtgcacagctcttttgagaagttttgctgccaaggaaaggggagatgtggagtgattgctcgagggaaaaacagggcaaaagggtttagtttggtttttggggacaggagaagtggcatgtgctgtcatgctggtgagaattgtcccacagtgagggaatcacccatggcagatggaatgggagggagggagatcagacagtgaccccacgggtggaacgggagggagagagatcagatattggccccacgggtggaacgggagggagggagatcagacactggccccacgggtggaacgggagcgagggagatcagacagtgaccccacgggtggaacgggagggagagagatcagacactggccccacgggtggaacgggagggagggagatcagacattggccccacgagtggaacgggaggtagggagatcagacattggccccacggggaggtggatgctggggtgggagctcctcaggggcccctctgctgtctttgaacgggttccctcccagggttcagacaacacccctgaccttctcctgatctgttacggactgcaagaggattaaggactgtgggcaggtcagatattgagaaggagagagttcctggtggatttaattctgtgaaaaacatggcagcaggcctgcagtcagaccgtgggtcctgttcttctccactgtgaagctggaacctccataggagcaaaagaagttggaagggggtgaggaaggaagaggggccatgttgtgaagagtaaaaataaaacaataaggctgtcatcactggggggctgtcagcgctcaggccacaccccctcagcaagtgacaaggacaaacagttgcacggtgcttaacaagtttaaaaaatatataatattttcactctgataaaagaaaaacttcagccgaattaaattgaaaggagttgaactgagcaatgaacaattcgtgaatcaggcagcctcccgagccagagtgggctcagagactccagggcagccacgtggtggagtaagatttatggacagaaagaggaaatcgactacagaaagcgaaagtgaggtacagaaacagctggattggttacaggttggtgtttgccttatttgaacaccgttcagtcggccccctttgattggccaaaactcagtgactggcacaagtgcaggctacagtctgttgatgcctccgcttgttacatcgatagttcacgatgtacagaaaaacctttaggccgaacttaaaatatgtaaggaggcagctttaggctaaacttgatttaacaacatgcatttagctttctgaactcaatgttatttcaactgctcttccccaagcttccagatgggaccggagtttcggggatgtggtttgcccaaggatgcacaccagagggtggctgagcctggcgggtccccgatctgtgccccagagtgagtggcaccagagagaggatgcagccctcaatgtttctgcactttgagctgattgctttcccatttgaccctagaagttggatataaacattgtcttgtgtttgatttcctttgtttggggaggtcataaaaaggccccaacaggattctattaaagctttttcttccaagtgagtatctaaggccaagttataaagcgttgcaggggaaaagcgaatatttgccttgaaacctcttcccttgccttatagaaaaccagaagagaaagagcactgagcagaggagaagcatattgcttccttcccttgtccacgtcctctgggcccccagtccacgtgactgtggggcctgggcgcctgccccatcctccctccaccgagaagggagcttccagtgtgttaaggggggcagcaccgcagttctgttgttttctttccacaggcttggggttcacaaactcagaagggatttgtccctgagcatttttctcccttggttttttaagccatttgggtttcaaggaaattgaatccatgtgtgtttggattaattgcttaactcctaaaaacgttgttttgtaacagcaatttgacatccaaaaagcttgttaagttactttccatcctttttctgtggtcccaatcgggggaaatgggagatccctcctgcaccagccccatgcttacagctggaaagggctaatgaggaattagcgtgatgttcagtttatccccaaataaggcgggcttgcaaaccccactctgaaatccaggaagcctcctgggtcctgctgggtttctgggctttagagaatgtggacaccttctgtggtctcgtgttcaatttgagatttccttttccctgggtctcgtttccagagcttgactgatcctctggtggttcaaatcgcagtggaggagatgtcaggcccccgaagggatgcatgtctcagcagtcagggctcttgaggtctaggaggtgctgctgagggagggaaggttcgtgtgctctgctctagaaattgttctgatgttcaggcgtggtgactgatgggatggccccgtatcatgagtcaaagaggaagagtgcaccttcttgaatggccaggtccatcaggaggctccggggttaatgtcatccggaagagaggagtgctcttaggctgggcatttacccctagacctcagttttcccatctgttaaacaggaataacccctgacctcagagttgttccacgagccgtttcctggtgcccccggacttcatgtgagcaggcatctgcattggccccagtggacgctgagggtttcctcaagtggaccctttcctcctggggccttccattaccttccttctgcctgatctcattcatctactccccacctggcctctgataccttccctgatgacttcagtcaggcaggcggtcttctgcttccctagcgaccatcacagaccacagagattagcaagcacgtcagtgtttccagaaggagggcggtcacccattctccatattcctaccccctgcagcactcggcagagggccaggcacagcagcagctgttcactaagttccccttgattgataaactgctcgggggtgtagatgggtgtggctgtgggtgtggtggtgatgttggtgttcccacaggttctgctttcagaccctaagaatccaaatgaacccgcctaatgacttggcggaagttggctagctccaaggtccaacattatttcatcttcgtctcagcaacttgaccaggacttcacttctagcggtgtaggaccgattgcctgtagaggctcacatatgtgacttcattggctgacaggcacaaagcaaggtgtctatacccacaaagcaaagtgtctataccccacttctgtgctcctttatggcataaacggcatgatcaaacggttatccaccataatatctgcagtgcagctctgacactaaccacctggagttggtgcagatgacggattgggggctctgtgccctacaggaaggccctcactttagatgttggctgcaagttctggcccccccggatacatgcacctctgaccaactagctacaaattcaggagtttccctgacctcctggcattcagcaattcacaatgatgaaccacacaactcaggaaagtgctgtacttaggattgcggtgtcattagcaaggatataaatcagaaccagctactgggagaggcacagagggggaggtctgggagggtcccaaattcagagcttccatgtcctcaagactatgcaaagcctcccgggggactgatgtgtgattacgaaccagggacagtcatctgagcttctgatgctcagaggttttactggggtttcatgatgtaggagtgactgataggacttgatctccagtccctttcttctccaggaggtgatggagaagggcctcagcctgctgttcacatggtcagtctttctggcatgggctgtcctaaccctgagtcccctcattagcaaagactttgagggctcactgtgaataacaaagacttgccaaggatttgggggtgacttcccaggaacaaaggccagtccaattctgtgttatacaacaatttgctggtgctatccaatgacgtgctctcaccagcccttgccatgggatgccgactctatgactcttacaaaggattctccctgacccagctgacggaagctgcgtcccaagtgctttgcagagacagcagaaaccgtccagagaggccctttcaatggccaagtgagtgctttgttctgaaggaagttacagcccaagttcgcacgactatcatgaaatcttcaaaacatttcattttttaagtcatgagattcccctgagccctccctgtccaagttgtgtgatgctcactttcagaaggaaaggagccaggacagaaactcgaaactcattccccttacacgaatgagtcttgtttcgagggggactcctctccatggtgggattttcagctcagctcagcgtccctcacgcaccaggcaatgcaggttcagtagggatgcaggcttgagccccacggtggaaggcttgcagcctcaggtgcagaggggtgaggctggatcacggatactgagcaagaatttcagtttgggctgggaagaggtatatgcccggagggcactgggaacacagagcaggtgcccctggctcagaccaggagggttagggtcatcttggtgtctttaagggatcagtgggggtggctagatgattgtgggtaagaagacagcatgaataaggcagagaggagccaaacagcaaccccaggctgtttgaaaatgtggaagttttgagtggggcttgagggctttatcagaagaaagctggccaggcgcggtggctcacacctgtaatcccagcactttgggagactgagatgggagaaccacttgagttcaggagtttgagaccagcctggccagaatggtgaaaccctgtctctactaaaaatacaacaaaatttgctgagtgtggtggcgcacgcctgtaatccagctactagggaggctaaggcacaacaatcacttgaacttgggaggcggaggctgcagtgagccgagatcgcaccattgcactccagcctgggcaacagagcaagactctgtctcaaaaataaacaaataaataagtaaaaaaaataaataaacaaataaaggagatagccaaggagctcagattgtcctgtataaagtagagccatcaacagatgaatggagaaataaattgtgttatacacacacaagggaataacattcaaccctaaaaaaggaatgaagtacatattgagacaggccacaacatagacaaactttgagaacattagctaagtgaaagaagccagacacaaaagaccacatagtgtatagttctatttacatgaaacgtccaggataggcaaacgcacagagacagaaagcacgtggtcacctggggttagcggaggggagggaaggggagggactgcttgatgggtacaggggttgcttttgggatgatgaaaatgttttggccctagatagagggggtggctgcacaacattgtgaatgtacctaatgcccctgaattgtttatttttacacggttaatttatattatatgaatttcatctcaatttaaaattgtaaaagatgaggctgagcaatggtacgaattaagaatggggaatggccacagtggacttttagaaggttgctcaaaggacagggtaggtgacaaaagccatccaggcagggtggcagaagggagtgttcaaaggccatttctttctttctttctttcttttttctaagacggagtcttgctctgttgcccaggctggagagcagtggcatgatcttggctcactgcaacctccacctccctggttcaagtgattctcctgcctcagcctcctgagtagctgggactacaggcgcccaccaccacacctggctaattttttgtatttttagtagagacggggtttcaccatgttggccaggatggtctcgatctcttgacctcgtgatccacccaccttggcctcccagagtgctgggattacaggtgtgagccaccgcgcccagcccaaaggccatttcaaaagtctccatgaatgacaataaggtcttaaacctggagaggattttcatggaaggatggcattaagaatttttaggggcttcagtgggcatgcagggtgactataaggaacgtatttttttcagaatggcacattaatagaaagtggtcctagggcagcgctttgcctggtagactctgcctttgtgctctatgtccagcccttaccaaagcccaggattcatgccccagaggtaattggccaacgtggagctggagaccttcacccccttccaagagaaagctgcctagggttaagtaggatgaacttgaggacagttctgggaacagtaggctcgatagcctctaaaataaacttaacttctgagtctctctcagctttgcctctggaatcagaactggaatcatttacatactcgggtcaagtagaagtggcagaatcacgaccccctccttagccccactctgaaacgttgtctgtttgcatagcctgaatcctttgtacagcccttccctgtctgaaccctcatgacttttctgaagaggactttgtgcttgttctgtgtgccaggaattttaaaatggcatttagcccaaagcaagaaagttctggcctcatctttataaaattattttttaaagggagggcagtatttaatgatgcacagagggactatccatgcccatagctggtccctcatcactcagcatatgccagggtaattgctctttcctggtggtggaggtgaccccaggggaccctaactaatttgaatatcaagtctgataagaatgtaattaggaaaggactgcagaaaatctggtgatgcatttctaaagtcagacaaaccatgatttgcccaatttctgctgtatattcaactctcttttgggttcttgcataaggaacaaacacctcagaggcatagagtcatagactcttagatggaaacttgccatgtgtcatccagttcaagccccacacccgtgaggctgacatctgccctcacacacacacctgtgcagagatggtcccctgagctgtcctggcccattagtgacttccatcctcctggttacagtgatttcttccaaggtggtcaaattgtcagagatgtgtgaaatagagcaactctatcttcaataagagctgagtaaaatgagactgagacctactgggctgcattcccagacggttaggcattcttagtcacaggatgagacaggaggtcggcacaagatacaggtcataaagaccttgctgataaaacaggctgcagtgaagaagccagtaaaaaacccaccaaaaccaagatggtgatgagagtggcctctggtcatcctcactgctacactcccatcagcaccaagacagtttacaaatgccatggcaacatcaggaagttaccctagatggtctaagaaggggaggcatgaataatccaccccttgtttagcatatcctcaagaaataaccataaaaatgggcaaccagcaggcgttggggctgctctgtctatggagtagacatttcattcctcaactttctttcttttttttttttgagacggagtctcgctctgtcacccaggctggagtgcagtggcgcaatctcggctcactgcaagctccacctcctgggttcacgcaattctcctgcctcagcctcccgagtagctgggactgcaggcgcctgtgaccacgcccggctaattttttgtatttttagtagagacgaggtttcaccatgttagccaggatgttctcgatctcctgacctcgtgatccgcccgcctcggcttcccaaaatgctgggattacaggcttgagccactgcgcccggcccactcgtctactttcttaataaacttgctttcactttactctgtggactcgccctgacttctttcttgagcaagatcccgataaccctctcttggggtccggataaggtcctctttccggtaacgaaatcagtctcccgtgagtcagtcccggggtctcagctggttcacagggaaaggctagttctcttttcttgggtgtgcagggtcagaaggatggaaggctggagttgctgtttctgctgctacttgggtagaatctgccgggaaatgaagccagcacagcggagttgagagatggtgagaggttcttggagacgttgtctgctcatttgagtccagccatgtggaacattctggactttttagttatatgaaccacaacttgctcccaccaccttttaaaaaacttcagccaattaagctgatctctggctctttgtcctctagtgccccctccgttatctgtgtgcgtgactgtcaacttcgcctaaaacctggggggttagatggcatcccatggaggcccagcccatcatcggctcctctgtctggtgacaaggacgctctccccagtggcctcacccaatgtcctaattctctttagggaacagcacgaagcatgttgaccccttttgggtaaaacgtctttgttagctgagctccaaaaattcttgcctcaaactcttcatttgcatgtggggggaccccacctccctcctgagcttcctgcagtctaggggacaaggagagcaggtagggggtagctacggttttcctctcagtcctacctttgctgaaggggccctcacctcagcatccccggcactggctgcctatggcccccatcatcctggaacacaggtctgtttccccaacatgttcgcacaaatatttgtgtgcaagcaactgtgcagtgtttgacctggtgatggagaaaagctcacaccacagccccactcaaccaatagccccagtcatacattagagagccgtccctccacctccttcacctcccacgagtaggaccccctcccaccccagcacctttgcccactggctcaggcacctcctttcctcctagcccacttcctgctttacacacgccctgcctccttctcccccagttgaagtctcattggtgttttctagggccatatattcccagcccccgtggcctccaggctccaccctcgttccccctctccccagctctgacaaccgtgagcctccacttccgcagcacagcagcactgccagggtccccaaaggcccatgattttcttctttgttcctcagcaagggtagggggcaggaggccagatttaagtcccccccagcaggagttacacctctctccctgggaggcagggccagccacagtcactttgggttttcaataaccatttgttttctccctgcagcatgggaaatactttcagcctgtgataagatctggtccctaactgtcctccttccaagctcaagctcagctaacattgtctctccatcactcctcctctttccagacccttcaccttctgtccagaatgtactcccctgaatgcctcttccgtgaatacacccttgtttgctcccatctttcttaaaccagggcgtccagaatggaaggctgaattccagatgtgacctgaccagcggcgtgaggctttcccaggggttagcttcacgcaatccaggctgtgctggcttctcctggcagtgtccccatcatcaacttccatgacatttgctatccctatccatcgtcggtcagcagcttcccacacggcaccctgctgttgggctaggcttccccagcttgtgagggcgccctaagtgtgaaggagctccagcaatgtctgacccaccggttttgccacagtgaggcatctgatttagttgattttctgtatcgactccattatccttcacttgaaacatccctcccaggtgtgtgccatttgcaaatttgacaaaaatgcccctgcttctctctaagtctctatggaagtgctggctggcaccaaaacaaggaggcctggggcctccactgtggctgtccttcagggtgacccattgtctgcagctgtccatctagctatgaattgacctggtggtgctaccatctagtccctgtttgagcacctaatttacaaagatatatgccagtcagtatattgtctgagacattctttggatccataaatctggtaactcatggaaaatggaaataaggtcctttgttgagacaaccaggtgggaaggggtcccaagagaaactccagccggcctgcgtactgggaggaatccgccctggggtggagccacagaagtctgcaccatgtgcagtggggaggagcctggctgctcctcttcttgggtgaacctgggattcaatctgtgaggtgggaatgctatactaggtggacttgctctgctgagtctgtttcccctttttttcttttttctcaataaatactattattcccacccttcaaattgtctgcgagcctaatctttcacagccgtgtgacaaggaacccgtctttagctgaactttagctgaaaatgtccaacaatattgtgatgtgttttattcctgaagagtttcggttttgtgttgacttcctttacacattcattaaccagctgtaaaatcatccttttctaacgatttacatcacatttactggactatcatttctagaattttcttccttgcccctttttgaaatcaggtcagcagctcacggcctgttttcagcacttctcttgtccttcgtcatttcttagaattgttggttatagctctgagacgttgactcctggaggcttaaatacctgagatgcgattcatcagggtctggggaaggaacttgtttatagcagctggggtagctattttctcttttcacttatatctggacttatatccagctgctatcccctctctgcatttaattcaacaaacagttcctgagctcccacaatatgactggcatcatgctttgttttaaccttttcaattcaaaaaccattctctttcctggaacaggcagaaataggacgagagttgagactgtctgcctttgtcctcttcttgagggggtgtatttgtccattttcctgctgctgataaagacatacccgagactgggtaatttatacaggaaaaagggttccacatggctggggaggcctcacgatcatggaggaaggcaaggaggagcaagtcatgtcttacatggatggtgcaggcaaagagagagcttgtgcagggaaactaccccttatagaaccatcagatctcgtgaaacttattcactatcacagtaacagcatggaaaatacctgcctccatgatttaattacctcccaccgggcccctcccacaacacatgggaattcaagactagatttgagtggggacacagccaaactatataagggggacttggtgtgtccttgtccaccttgctgagggttgctgtaaagggtgtgtctgagtgtgtgtgctgtgtcctttgaaggctctggtttgttcccagttcatacccttctcttccctccagctccatgggctcatctctagaagatgggagttcctggggttggctcatgcagccccatccacttcttaagctatagctccagcccctctcccagtggagtccttgcagttgcaagaccagaattccatttacaaaaacattccatgagccacttatcctgggagagactcagaccaggggctcctgtctccctctgcaacctgttttctgtggtagggagggcagggtggcttattcctttgccattttggagtcagggggttagaatcattttattaaggtttctgtaacttctttattaccagctagctcttactatgagagtcgtggaacagtctataaatcccatttctgaaaacaccactaaatttgtgcatatgtgtataagaaaagacatagaaaaaatctggatggggtcacacaaaagatgttagcagaagtgacttttggcgaggggtgagatgggtatctggaagataaggagaggggccattcacttttaccatatgtaacatacaaagtgtaattttaaaaaattatatatttatagttaaataaaaattataggaggtcatttttttggccttcgctcctgcactaggccccaacagaccagactaaaaagaaaaatgcagtcactcatagtaaattccacatcaccaaaccaaaactgagttgttagctggccttctaaaaaacagagacagataacaggcacatttcccaaacaggccagtttcactaggcttgagaatgaagttcccactgctttaatccttaccaaaaaaaggtaacctgcagtaaccttgtgttagccaatcagtcacctctccagtgctccctgttcccaccttacaagggatatagctttaaaatgatccatctgctttttgttctttctttctttctttctttctttctttctttctttctttctttctttctttcttctttctttctttctttttttttttgtattcgagggagtctcactcttgttgcccaggatagagtgcaatggcacgatctcggctcaccgcaacctctgcctcccaggttcaagcaattctcctgcctcagcctccctagtagctgggattacaggtgcccaccaccatgcctggctaatttttgtatttttagtagagacaggctttcaccatgttggctaggctggtgtcaaacttctggcctcaggtgatccaccttcctctgcctcccaaagtactgggattataggcgtgagccaccgcgcccagcctgtttttgttttcctcaacccttctctgtctataaagccaacttcctctgcttagttcattggaacacttattctatttttcatttttcttttctttctctctttttcttttttgagacaagagtcttgctctgttgcccaggttggagtgtagtggtgcaatcacagctcactgcagcctcgacctcctgggccaaagcgatcctccatttcatcccattccctaagtagctgggattacaggtgtgcgtcactacgccaaattttttgcagagacagggtcttgctatgttgcccaggctggtcttgaattcctggcctcaagcaatcctccagccttggcttcccaaagtgctgagattacaggcatgagcggcctcgccatgctgcttattctattttatataatgaagtgttgccctgactgtaaaatcacaaataaagccaattaagatatttaaactaaattgtaattttttcttttgataatatataatatacatatctgtgatctgtgagtataaacttttttcttcatgacaattatttcagtgtctgcctatcttatcaaacatacctgatcatagcaagtcccaggtacattttcaaatgggtacatttgggactggctttttttcactcagcgtaagcctctggaaattcatccaggttgccgtgtgtatgaatggcatgttctgttctgttttttccttttttttttttttttttgctgagtgtattccatagtatgtttgtttagccattctcttcttgaaagacatctgggttgcttccaggtttttttgctattattcataacactgcaaaaccattcatgtgcaggttttgtgtacgtgtgaacataagacttcatttctctgggacaaatgcccaagagtgccattgctggattgtatggcagttgcatgtttggtgttttaaagaaactaccaaactgttttccagagtgtttgcatttcacgttcccactgaaaatgtatgaatgatccgatttctctgcatcctggccagcattgcgtgtgattactttgttttggccattcttataggtgagtcgtgcatctcactatggtttcagtttacatttcctcaatggctaatgaagtgccttttcatacacttatttctcttctgtatatcctcttcagtgaaatgttttttcatgtcttttgcccattttctaattgggctatttgaattttttcacagttacatttgagagttctttgtatattctaattactagtcctgtgtttgacttgtagcctgcaaatattttccccccatctgtaggttttctttccatcctcttaacaggatctttcaatgagcaggaattttaaatttatttttaattttttttttttttgagacaggatctcacttcgttacccagactggagtgcagtggcacaatctcggctcactgcaacccctgcctccaggattcaagcaattcttgtgcgtcagcctcccgagtagctaggactacagacgtgcaccaccacgctcagctaacttttgtatttttagtagagacaggcttttgccatgttggccaggctgatcttgaactcctgacgtcaagtgatccgcccaccttggcctcccaaagtgctgggattacaggcgtgagcgacaatgcctggcctagtttttaattttgatgaagtccaaattatcaaattttccttttatgaatcatgtttttgatgtcaagtctaagaactatttgcctagccctaggtccctaaggttttctcctatgttttttctaaaaatgttataattttatattttatctttaagtttatgatccattttgagttaattcttatgaaaggtgtgagacctaagtagaatttattttctttctttcttcctttctttctttcttcttcttcttcttctttttttcttatggatgtccagttgccttagtttgttgtgaaggtgatctttctttttttttcttttttctttctttctttcttttttttttttttttgagacagagtcttactctatcacccaggctggagcgcagtggtatgatcttggctcactgcaacctccacctcccaggttcaaggaattctcctgcctcagcctcctgaatagctgggactacaggcacgtgccaccatgcctggctgatttttgtagttttagtagtgacagggtttcaccatgttggccaggctggtcttgaactcctgacctcaagtgatccacccgcctcggcctcccaaaaagctgatctgtgttacattgaattgattttgtacctttgtcaaagatcggttgggcatattcttttgggtctatttctgggttctctgttctgttccattgattaatgtatctactcttctgccaaataccaatcttgattagtgcagatattaatacatacaaagtcttgaaatggggtagggtgattccctcccattttattatttttcaaaattgttttagctattctagttcctttacctttccatttaaattttagaataatctcatctatatgtacaaacaaccttgctggaattttggtagaaattacattaaacctgtatatcaattttggaagaactgacatcattactacgttgagcctttcaatacatgaacacaatatatctctccatttattcagattttcttggatttctttcacaagtctcgtgtagttttcagcatacaaatccatgttttgttagatttacacttcagtagttctctttctctctctttttcatgatcgtaaatgacattgtagttttaattttggtgctagtatatataaataaataaaattttgtataattatcttgtatcttgcaactttgctgaagttatttattccaggagttttgttttgttttgattttttgggattttctaggtagacaagcatgccttctctttttttttttttttttttgttgagacggagtctcgctctgtggcccaggctggagtgcagtggtgcggttttctctcactgcaagctccgcctcccaggttcacgccattctccggcctcagcctcccgagtagctgggactacgggcgcccgccactgcgcctggctaatttttttttgtatttttagtagagacggggtttcaccgtggtctcgatctcctgaccttgtgatccgcctgcctcggcctcccaaagtgctgggattacaggcatgagccaccgcgcccggccagcatgccttctcttaataggcatagttgtatttcttcctcttaaatctggatgcttttaatttccttctcttctgtcgttgcactggtgagaacttgcagtataatgttgaataagagtggtgagggtggacattcttgccttattctcggtcttagcaggaaagcattttgtctttatttagctgctgggtgttttggtaaatgagctttatcaagttaatatcaatattccttttttctctaagagtttttaaaaattatgagagtgttgaattttgtcagatgctttcactgcattgattgacatgatcctgtggtttttcttctttagcctgttaatacggtagaggacatttattttgggatcttcaaccagatttgcatccttgtgatagatccttggtcatattacatgattcttttaatgtatggctgaattctctgtcaatattttgttaaggatttttgcatttaaattcatgaggcatattgctctgtaattttctttcttttttgtatgatcattgtacagttttgacatcaggttaatactagcttcataaagtgattgagaagtgttacttcctcttctattatcatgaacagactgtgtagaattggtttaaattcttcaagttcttgctaaaactctccaatgataccatctacgcctggagatttctttactaggagtttcaaaattatcagctggatttcttaaacagttacaggggttatttaaatgatctattttatattgggtgagttgtggtagtttgtggatttgtctgtttgttgaggaagtggtccatttcatctaggttgccaaatttatgtgcgtagagttgttcctagcattcccttatctacttatctattgattcattcctttcacaatgtttattatgcacttgcatttttctctttttaaaattgtggtaaaacatatataacataaaatttaccattccactttctgtctctatgaatttgatactgtaggtatctcactttagtggaatcatacaatatttgtccttttgtgctggtttatttaacttaacataatgtcttcaaggttcatccatgttgtagcaggtgtcagaattatcttcctttttaatgctaaataatatttcattgtatggatatcacacatttggtttctctgtttatatctgttgatggacacttgagttgcatctaccttttgactattgtgaataatgctgctgtgaacacggtggtgcaaacacctgtttgagttcctgctttcagttcttttgtgtggatacccagaaattggattgctggatcatatggtaattctgcgtttaattttctgagcaactgtcgtactattttccacagcagttgcagcattttacattcccagcagcaggacacaggattccaatcttttcacatgcatgccaacacttactattttgtggtatctcattgtgattttgatttgcatattcttaatgattagagacaaatattaattaccttttcttgggcttactggccatttatgtgtgtgtgtgtgtgtgtgtgtgtgtgtgtgtgtgagaaatatcacttgtcatccttatgatagctgcagggtctatagtgaaactcccttttgcattccttacattgatactttgtgtctttcatttttatcagtcttgctagggatttgttaacttcattggtctttcaaagaaatggttccttgtctcaaaaattttgtttttttctttttgtttttagttccattgaactatctttattatttctttccttctgcttgctttgggtttattctgctgttctttctctaggttgatgaggtgggagcatagattgtttgagactcttttcaaatgcatacattttaatcctatgaattttcctctaagcactgctttagctgtgtctcacaaattttgcatacatgctgtactttcattttaattcaattcaatgtcagttttccccccttgaagctgcctctttgatccatggattatttagaagaatgttatttagtttccaagtgttttgagattttcctcttatctttcggtttttcttttctagtttgatcccattttggctagagaacacattctgtatgattttaaccattttaaatttgttgaggtttgattactttgtttgaggactaacttggtgtatgttccttgcacactggaaaaaaatctgtattctgctgttgttggatggaacggtatataaatgccaattagatcctattggttgatggtggtgttgagttcttttgggcttgctgaggttactaaggctactttgttgataaatccagtggatattttcttgtcttcatccaacttgaactctcctgggtttttgcagtagcatcttcactcatcctgcctcagtgttggttcctctagtccattttccatttggcagccagagctcaccttctagcaggtgggtctggtcctatgggctcttcagagcctttagattaatttaaattccttagtccagcatgcaaagccctttgcaatgtggtcttgttcacctccccagctttgttttctgccattcttccttgtaccccatgaaccagccatccttgaccaatgccactctccttgaataggctacctccctcctctacttaatgcttttgcatgcactgtttcctgtgcatggaacaacactcaggttcccctttatcctgccagtccttctcttcctctccactcagatgtcccctcttcccagaagcctgccttgaactttctccccattccaaagagatggaccatctatgtgttgtcatacagctttgaggttctctagctcagcattaatcatgctgccttccttactttcaattagtctgcttttcccacaagacaggagctctctgaggttaaggattgtggctcaaggggcccctcaggacatctggggcttagcagatgtgtagatcctggctgctgagtgaagcagaagcaaatggcgtgtacattagaacccaaatagagaagttgcttgttttttctttcttgaaatgcagcagccactccttactgcaccaaggatgtaagtggagcttgacattggactttccgactgcatgctcctagagggcagctctgttttggccttgctatcatcccccaaaacactagagcgtgggggttagtttcagtgctgatctttattgctcagaaattttattttgtacttactcaaagagttcttttagaattacttagatacagtgggtttttaaatcatatgttgcttttatgcacaataaaaaggaaaatataaacaaaactaatggttaagaaattcctgacacttctttgccttcggagtgagggatgtccttgtttttcacacagtattgtcctctgagccatcaagagcctttgtcaggcaggattccttagaagaattctccttggccacctccaggattgtctcccaaggcattggtgcctgtattgcagaatatgctggtgccttggacgtttgcccacatttgtcttctccaattctcccacccaactgacagaacaatgacactaattttttttttttttttttttttggagatggagtctcgctctgctgcccaggctggagtgcagtggtgcgatctcggctcactgcaagctccgcctcccaggttcaagcaattctcctgcctcaccctcctgagtagctgagactacagatgcatgccaccactctcagctaattttttgtatttcagtagagacagagtttcaccgtgttgcccaggctggtctcgaactcctgagctcaggcaatctgcccgcttcggcttcccaagtgacaacaattttaagacatatcccaagtgtagcatccttagagtgtggaaaaaaaaagtgtatcttagagttaacaaaatttgattaaataatccttccttttccattgttttgaatcatttttaccttatattcagtttccatatgaacacgaggtctaagttctcagttctcttccaccagctgatcagttcttgtgtgagtatctggcactctgccttcttactatggtgtggaatatgccttcatgtccaggatggcaagtcccctctttattcctttttttcagtgttattaacctagccttatttttatctatctatctatctatctatctatctatctatcatctatctatctatctatctatctatctatctatctatctatcatctatctacctatctatctattttcttgagacagggtcttgctctgttgcggaggctggagtgcagtgaattcctgggcttaagtgatcctcccacctcagcctcccaagtggctggaactacaagtgtgcaccattgtgcccagctaattcttaaattttttgcagagatgtggtattgccatgttgcccaggcttgtctggaactcctgagctcaagtgattctcccacctcagcctctcaaagtgttgagattacaggcatgagccactgtgcctagtctacttttatttctctgtatacattttagaataggtttatcaagttcctttaaaaaaatccaagtagaattctgggtttttgtattgagtttattgattcattacagtgaatatataatttataattaatttataatacaattaacacaaatttaaattacaaattaatataaagaatgttgttaatataattaattataattaacatcaatttatattcatttacattacaaatcaatataaataaattatgttatagaatacattgtattatatattatataataattaatatagattaattttaatctatattaatagattgatttggtaaaaactgatatctttataataagttatcctatgcaagaaatgaagtgtctccttttaattcaaatcgtcttgtgttttaagtcatgcttattgaggtataatttacacacagtaaaattcactccttttagatacacatttctatgcgttttgacgaatgtataccgcgatgtaatcattgccacaatcaagatatgggctatatttggggtctgtctttacttggggagagcccagtcatcaagccaagaaatcaagtgttgattctggccttcagccccctttgaaaagagctggggaggaatcagcaaagccccaggagtggggcatttgctggtacggaaggtgggagtgagatttgcaaatgggcctttcaggcagggtccttccatgggggctagggtgagaaatgaccttagtgctgccaaccaagtcaaccactgggtagatatgtatattttttttgagacagagtttcgctctgtcgctcaggctggagtgcaatggcacgatctctgctcactgcaacctccgcctcccaggttcaagcaattctctgcctcagcctcccgagtagctgggattacaggcacccaccaccacgcccggctaattttttgtattttttagtagagacggggtttcaccattttggccaggctgatcttgaactcctgacctcatgatccacccgcctcggcctcccaaagtgctgggattacaggcatgagccaccgcgcctggcttttttttttttttttttgagacggagtcttgctctgttgctcaggctagagtacagtggcgccatctttgctcactgcaacctctgcctcctgagttcaagtgattctcctgcttcagcctcctgcataccatagttgggattacaggcgtgcaccaccacacccagctaattttttgtatttttagtatagatgaggtttcaccatgttggccaggctggtcttgaactcctgaccttacgtgatccacccacctcggcctcccaaagtgctgggattacaggcatgagccatggtgcccggccccactgggtagattttaagttgatctggcggaatgaatccttgcttcctggtctctcattttcagctgttttgcaactgtattcttcccctctgggctccccacttttcaaagttgctgttggtgatggcgttgggtatgtgggtctatgttttaattctaaccttctttatattaagagggaaaaaggtttgtctgaccgtggccaggacagagaaggtgcagggcatacccgaggtcctgctgtgtcgtggcagccgccaccctaggtcccgggcggaggagatggagaggggaaccagagcagacagagacagaaagtcattcagcagagagcatcagagaccctgagcgtgctcactcccctacctgcagctctcctgcagtagcccccactgcttcatatatgtgcacttacattttcaaaggcaactctataaaggccagccacagcccaggagaggctgcgacatcttcagtgctctcagctcctgcacaaggagctgacttacttagcttctggataagctgtcactgagtgtacaaaaggggtgagggccgcagacacccatcttttctttttttcttttttctttcttttctttgaggtggagtttcgctcttgttgcccaggctggagtacaatggtgcgatcttggctcactgcaacctccgcttccagggttcaagcaattctcctgcctcagcctcctgagtagctgggattacaggtgtccgccaccatacctggctaagttttgtatttttagtagagacagggttataccatgttggccaggctggtcttgaactcctgacttcaggtgatctgcccgcctcggcctcccaaagtgctgggattataggcatgaggcaccgcacccagcccccatcttttctttttcagaaaaatctgaaaaatcccatggaccctgggaagctgccaagggcccctcgcaggaatctgtagttaggaaaattccattgataacagctgatgtggattgagtccaggtggctgccactatgctacaaacctatgagatattgttagttacccccatgtgatggttaatttaatatattaacttaaatggggcatggaatgcccagatacttgctcagacattattctgagtgtttctgtgagggtgcttttggacgagattaacacttaaatccatagactgagtaaagcagattacccttcgcaatgcactgaatgttcttgtctctccccccaaaattgatatattaaaaacctaatccccaaggtgatgctgtcaggagatggggcctttgagaggcggtcaggtcacaagggttgagccttcatcagtgggattagtgctcttataaaagagcctctggaggaccccccacccttctaccatgtgagggcacagcaagaagctggccgtctgcaacctggaagaggacccccaggggaaccccaccgtgctggcatcctgacctcaaactttcagccttcagaatgatgagaaataactctctgttgtttacaagccaccgagtctatgggattttgtaaaagcagcccaaatggacgaagacaccctccatcatgagtgggcctcatctaatcagttgaaggtctcaatggtgtagttcaaggttagccctttgctgagtgagtgagaactctcctacctgatgggctgtgagctgggaccttggctctccccgcttctgcagcactcctctgtttttctggagaactgtcactaaggcattttacagatatgaagaatgaagctgaaggccaggcgtggtggctcacaccagcactttgggaggccaaggcaggcagatcacctgagatcaggagttcaagaccagcctggccaacatggtgaaaccttgtctctactaaaaatacaaaaattagccaggtgtggtggcatgcacctgtaatcccagcttctaaggaggcagaggcaggagaattgcttgaactcaggaggcagaggttgccatgagccaagatggcaccactacactccagcctgggcaacagagtgagacttggaacagatgcagagtgagccagtccaacaacccctgcacttccgccccacgcccctctccagatgtaaacactgtgacattttagagcatgctcaaataggcatatcttccagatcttttctgcacaataatatacatacaacagcttacataattgtctgtacaagaatatatacacatataggcacaatatatatgtgtgtgtgtgtctacatatttatatatttctagctttagttgttaaaaaatattaaaaactacataattgtttgaagcttgcttttttgtctaaaaatatatcttggagagctttccacatcagatcattcagtgaccttctgtgtgttgactggtgcatagtattccatgggatgtgtgcaccactattcactgtatcgtcttattcatggacatttatttccaatctttccgctcagttagagcaatgctacaatgcacagccttggctattttgtattgcattaaaaaaaaaatcaggccaggcatgatggctcactcacgcctgtaatcccagcactttgggaggccgagacgggcggatcacgaggtcaggagatcgataccatcctagctaacacagtgaaactccgtctctactaaaaatacaaaaaaaattagccgggcatggtggtgggcacctgtagtcccagctactcgggaggctgaggcaggagaatggcgtgaacctgggaggcggagcttgcagtgagccgagatcgcaccactgaactccagcctgggcgacagagcgagacttcgactcaaaaaaaaaaaaaaaaatcagatgggacttattacaaaacatactattatcttatgtggcaccaagaaggaaaaagatgctgctagttacaatatggcacaatgttcactgtaagcacatacagttcagagatgtgaacgtgtgaaaaagtgtgtacctttgctctgttgtttgagcaaacctgtgggagagcatcttcgacgtggaggtgctgggctgagacgtggaggctgcaaggtggacagtacttagggagcaacatgggcaaggcgaaggttggaggctgggagggacatcgattcaaatcattgacagaggctaacagatggtcccgcatcagggcggcaccaatccatcttccatgtgggagtctttgaaagtgttgactggctgggcgcggtggctcatgtctgtaatcccagcactttgggaggccgaggcaggcagatcatctgaggtcaggagttcgagaccagcctggtcaacatggtgaaaccccgtctctactaaaaatacaaaatattagctgggcgtggtggccagtgcctgtaatcctggctacttgagaggctgaagcaggagaatcgcttgaacctgggagacagaggttgcagtgagccaagatcgagccactgcactccagcctgggccacagagagagactccatctcaaaaagaaaaaaaccaaagtggtgactgacgtgacttagtgccttgggaggagatgaattggtttcctgttgctgctggaacaaatgaccccacactgcatggcttagaacaatggttttagacaccaggagtctgaaatcaccgtgtctgcagggccacactccctctcgaggctctaggggaaaaccctgccctgtcttttccagtttctggggcccaggtgtttgctggcttgacatgcagcacttcagtctctgctgccatctgcacgtggcctccccctgtgtctctgagtctcaaatcttctgcctttctctcatgaggacacttgttattggattcagggttcacttggattatccaggataatctcatctcaaatccttaacttaatgacacctgcagagacccttttgccaaataaggtcacattcaccggttctgggtggacatatgttttgggggcctctattccaatctgcaacaggaggtgacttccttgggtgtgcttgtccactccttaagtccccagtgtccggtccagagctggtcacagtggcccaggagctgggcagacataaggggtgagcctgtttctggagaagccccatgtcccaccagtaccagaggcagaatgtgaagactgggagcatggggcgggagagtaacaaaggcaggtgggaggggctgctctgggaacagaggggaggacggggacagagatgaggaggcttccctcctagggtacaatggttgctcagctgaggcctgggaacctggggagagacacagacattcaggcctgatccaggagggtcgggctggattcaagaggttgggaagacttctgcagaatcaagatattttaaactaaggcttaagacctgctgacaccaaggcctcaatcttgccatctgtaattgcctgtgaccttataaaacctgtcctcccctccggggtcgtgtttgtctctttcctgtgagctggctggaggctgggctgtcattcaccatccccagtagctatcaggtctctatttggcagtaggcacacacgaaatgcactctttgcctgcaaagcatccttgtcctggaggagagaaatgaaggtaaagagctgtcaaaatgcagtatggtaagtgctgagtgctgcatgctaagtgctgagtgctgcatgctaagtgctgagtgctgcatggtaagtgctgagtgctgtgtggtaagtgctgagtgctgtgtggtaagtactgaacgcagcatggtaagtgctgagtgctgtgtggaaagtgccgagtgcagagtggtaagtgttgagtgctgagtgctgtgtggaaagtgctgagtgctgtgtggaaagtgccgagtgcagagtggtaagtgttgagtgctgagtgctgtgtggaaagtgctgagtgcagagtggtaagtgttgagtgctgagtgctgcaggccacccaggtgccttccactcatgagtgcccccacccccgttttacagaagaggaaactgagactctgagagggcgagctcctgcctagcgacccagtggtgatggggaagggctagagctccacactgcacccatcagatcccaaagtcttgctctttctggaataattcaggagtgagagaagtttggtggggcgatgcctgtgcagggaaggaggagagagtgcaggatggggcaggaagagcctcccactggggtgccctctgacaaagcctaggatcccccaacagggagctccagaacaaaggttgccttggaagggtcatgtgagtggcccacctcccagctcctctaggacagataggtgcccagaaatgtggggttcataccccaggccttgcgtgactttcctggggctgccgtgatgagttaccacaaactcagcagcttaaaacaatggaaattgattatctcaaagttctggaggccacaggtccgagatcaaggtgtcagtaaggctgtgccctccacaggctctaggggagacccctccttgccccttccagtttctggcttgaagctgcttcactgcagcctctgtcctcacacagccttcatctctgtgtgtccagatctccctctccttataaggacactggtctttggatttaaggcccacccaaatctagtgggaccccatctgaactaaccacatccgcaaagaccctattttgaaataaggtcaccttctgaggtttcgggtgagcattttgggggacaccgttcaacctggtacaagtcctgtccagaactggaggagtttctcagaaatgagatctaaatggacacctgcaggggccgggaggagagggttctaggcaggggatcagcctatgcacaggcccagaggctaaagattgtgaagctgtttcagtacagtgagaacattctagaaataaggatggtgggggtcacaggcaggcatagtgccaaggtcagcagggccgcatcaggaaggggcctctgagccaggttctggaatctggcctttctcctgagccatggaaaggccctaacccaggctccaggggattggcctcctccctctctccagggcatggggtctccctggatgtctgtccccgcctggggatgctgaatctcccctccccctcatctcttccccttcccctcccccagcacctgggctgcctgcagtgacaggttccagtaacccatgctcctatcagatcgccagacagaactggggccaagagcacgaagaggatggggagtgggcgggagcgctgttgctgggaaatgtctgggacacttgccctgcctcacagagagtgtccggccacctctgatgcgggacaggagcgctcaggggaggaaggcgaggaccttagggcctgtgcaccctcctctccaggtaggaagacgggaggagggggccttggggcagctcaggactgagactttctccctccaggtggggcggagctgcctgcacctgcctctctgagctcctcttgcattgctggggactgaggcgatttccagggcgtggcacgaaagcctctcttccttttggatgacttaagaatctgagtttcttcctgacagttgatcccagcctggagggtgttcctatcttgtgtggcggtttcagatctagaccccagccatgtcagactggaaggcagctcctcctctggggctcccgaaagagacattcctgggtaatcatcgtcagcaacccacccccacggcaccacacggcagaccccagagccctggctgcgcctctctgctcagccagcaggttgccatggcaacgagccagtataagcatctccatcaataagccggaggcttcccaagactcctcgggagcctggcccccgacacagccttggggtgggaaagaaaccacaaggttccatacagaggtgattaaatagcaaggagaggaactgggcatgagaaagggctcagagatgattgcatcaaatgtctgtgtcttttgcaagtccaatcctgacactgcagtgagaattatttgcttgatgggaaatggcagaggggatgttctggatcccagactatggtgctcaccagactttgatttggggctacggggatgcaggctgctagtctgtcttttagctggtacacgtgtgtcccctgtggctacaccaggcctaatgaactcacaggggtgccccaggctgagctaaatgtgtctgcaggcaggagtgcattcacgtctgcacacaactgaatgtgcagacctaggagagacggaaagaagtgggggccaggcgcagtggctcatgcctgtaatcccagcactttgggaagctgaggcaggtggatcacttgcggtcaggagtgtgagaccagcttggccaacatggcgaaatctcgtctctgctgaaaatacaaaaattaacagggcatggtggcaggagcctgtaatcccagctactccggaggctgaggcaggagaatcgcttgaacccaggaggtggaggttgcagtgagccaagattgcatcactgcactccagtctgggcgacagagcgggattctgtctcaaaaaaaaaaggggggggggtggggtgggggggaagcggggacttcctcagtgacctgctctgtgatttgtgaagaacttcactccagcctgaatcctgtgcttggcactagagaaccaaacagcctctgccaacttgggtttgtaaagggatagagaatgttacaggataataaggtctttccctttggctctccgctttctccaggcataatcttgtctacatggaagatcatccctgagcaatgagctgcctgctgagggggtgtggtgagttgcacagagttgaggcaccaaggtcgggggcagagccggaccagccaccccagccctcttcaaaacacagcaggtctgggcttctcgcatagatcggctgccttgttagaataacctgaatataaaccaaggtcttgtggggcccagtctccagacactcaaagaggctggatctggcagccccaagaggattaaaggggattcatgtcccagcatccttcctctcctccctggctctcttagatgttgtagcatctaactcaccaatggcaaggatcaggctgtgagtccacttggccagtctgtagcacccagttatttgatcagacatgaagccaggtgttactgtgaaggtatgttgtagaggtggttgacatctaccataagctgactttaagtaaaaaagatgaccctcgaaaatgtgaatgagccttgtcccatcagtggaagaccttaagggcaaaaactgaggtttccctgagaagaataaattctgcctcaagcttgcagcatctcctcctgcctggggtccagcctgctggcctgtcttacagatgccagacttaccagtccccctaatcaggcaagcccgttccttaaaaagagacctccctctggagacccctgacaccaagctttctgaccttgtccaggcagcaattagtcaatttctctctcctccctccctccttctctcgctctctctttctttctgtctctccagctgctgctgctgctgctgctgctgctgctgcttcttcttcttcttcttcttcttcttcttcttcttcttcttcttcttcttcttcttcttcttcttcttcctccttccttcctccttcctcctcctcctccctcctcctcttccctcctcctccctcctcctcttccctcctcctccttcttcctcttcctcttcctcctcttcctcttcttcttctcctgctttcttctttcttcttcttccgtttcctctgttgcccaggctggagtgcagtgatacgatctcagctcactgcaacctctgcctcccaggttcaagcaattctcctgcctctgcctcccgagtagctgggattacaggtgcccaccaccatacctggctaatttttgtatttttaggagagacggggtttcaccacgttggccaggctggtcttgaactcctgacctcaagtgatcctcctgcctcggcctctctaagtgctgggattacaggcataagtcacttcacctggcctctccagctcctttttcactttccctttttacatcaccaatgacctggattctccacaacagaagcccaggaactgactccccacataagatctatttcctttatttcctttggtccagtgcctctctcctcctctttccagttccactccccaggaggccaggagctaggtgggagggaacctctcccaggaggcagggcatagaggcaggaaggtggagctggggagaggcagagacaaagctctttccctttgaaatgggctggggtggacctgggtggggccggaggaagatgggacacacaggtgagataatagatctttccttcctcgcgtaagattttatttgaagattagattctacagccaaagagaagttgaaagccgctggtctagaccagcccgtagtctaagctggtgactgaagccgagggtgtcaaagtggcttaaggtagcccttgcagcttaaatgcaggatgggggttggcactgggtcttctgaccccgaagtctgcactctgtgcaccatgagatgtgtcctctgcagcaaagaagctgaatgaaggtgtcatatacggagtgcaaagaggaccctgggagcaaattccatgtgcgtgtgtgggcggtggtgggggtgggaagagttccatggggagggtcatatccttctgagggagactgaagagaccttgtgggagagatctcattggaggtgaaccttgtactgtgaccgggctgcaagtactagaagtcaagggagggaaggcattcctccaggagagggtaagagcaggagccagggccgggggagcgctggggagcacttagactacagccagaggtctctattgtgctcagcatgcctggagctctgagtctacatgggtgcaggtggagaaaagaccagaaaggttgctgaggccatgtctgcatggctttgcatggcaggtggttgagtgtgtgctgagtttgtttggcagtgaggaagtttagggctttgagcaagacagtggcatcctggattgtgggacacagtgggcagagcctagagctgggaggccaatgagggccaggatgccaggaggatgagcagggcagaaggggagatgtagctttgcctggaggctgggcgatctgttcaggcttgaacctaagggtggaaatgcagccggggagtgacccctgaaggggtgaaagctgcctcagcaagtgatcagcaaaatccatcgatacttgaaatggaccaaagggtcttctgtttagaagaagctgcttgcggtgcagcaccgtggctcacacctgcaatgccagtgctttaggaggctgaggtgggaggatcacttgaggccaggagttggagatcagcctgggcaacagagcaagaccccatctctacaaaattaaaaattaaaaattagccaaatgtggtgtctcacacctgtaatcccaggttaaggcaggaggattccctgagcccaggacttcatggctgcaatgagctgtgattatgccactgtactccagcctgggtgacagagcaagaccctatcaaggaagacgaagatgaagacaaagacgaagacaaagaagaaggaggaggaagaggaggagaggaagaggaggaggacaaggaacaggaggaggaggaggaggaagggaaggaggaggaggaggaagaggagtggcagcagcagctggttgtaaagtgaagaatcattttacgataggattaaccatgaccaacccatgtccgtataagtttggatttccatgggtagaattttttaaaaatcacagcctgtctgtggctgtccatgctgtctgtcactggcctgaatctgagtggtagagagagcaactccttcctccacaccggccctgccccaacaagtcaggtaggccccctccctccctgctgattggatggtgagtgccccaagcacggtgctgcatccttttgcagaggaatgggccaagcagagcctggcatagctggggtgggggcagggcctccctgcagcatctttccatgacattgtcacagagggaacaggcaagttccattggcattgtattagcttcctagggctgctgtaacaaattcctacaaactgggtggcgtagaacaacagcagtgtcccttctcacagtgctgaggttgggagtctgaaatcaagaggtcatcagggtcgtgctcctggcagaggccctaggggattctgttctctgcctcttccagcttctggtggtcatcttgattcccgcactgtggtggcaccattccaacctctgcctctgtctttatgcgcccttctcttcttctctctgttcttctcttcttgagtttcttttttatttttatttttattttttcttgggacggaatttcactcttattgcccaggctggagtgcagtggcgcgatctcggctcactgcaacctctgcctcctgggtttgagcgattctcctgcctcagtctcccaagtagctgagattacaggtgcccaccactacacccagctgattttgtatttttagtagagacagggttttaccatgttggtcaggctggtctcgagctcctgacctcaggtgatccaccagcttcggcctcccaaagtgctgagattacaggtgtgagccaccttgcccacccctcttgagtttcttataaggacatttgtcattgagataatctaggaggatctcatctgagatacttcactacatcctcaaagacccttttcccaaatacagtcacattcacaggttctggggattaggatatgaacatacgggtttgggggcaccattctacccgctacaggcctgcagaggagtgagctccacgggggtgccccagcctctgaggtgctgcggctggtctatgttccggttctgtctctacctgccctctccttcacgccctccttgggtgttgggtaccctcttctcttccctgggtacccactgttccctctgtgggaccccacctgtgtttgttccctctacgcaataccccatctcctcacctcctttcctcctgggaaatgagcgtattttgcatcctgtctgtaacctggcctgacaaaccctcctgtcctcatatcataaagatccaacatactctgtgtggtccaaacagcggactggatcctggacattaccaggtgcgggtttgcagcccagctcagagctacattagcatggcggccaaggtcaaatcctctgacttcccatgtcttccattccccatatgtatcatggagataacaaggccctgtgctcttttgactaaaaaaaaaaaaatagtttctggaatgcatttccttccacctccatctcggcaatctctctctctaataatagacttaattatttaaatttaatttgttagaggtttgatgtttaatttgagaaacctaatgaatgattaacatttaataaatagtaaaatttaatatctatgaacttgggtataaatatataaatgatttaatatcttaattcaatgcctactttttaaaaacagataggaattgctcctcagagttatcatgccctgagtaagcgcttggcaaaaccgccaccccattctctgtgagtgaaaaacagcacagagcgggtcctgagtccttggatgtacaaggaaaggagaattgatcaagaggaggttgggtggccaccttgtccagtgcccagatccaggagcagctgtggccatggaggaggctgagttacagtttagctacaaagtatctccagtgaacaccttccccagtggtgactgctgcaaagggggtggcctccccccagggaaggggagggaggaggcagtctgaagaatgaggcttcttacagggacatcaaactgcacataaatagacgtgccgtgctttttatttgaatattaattggcattgatgaacagcatgtgtctagttacattggcaattagttaccaatgaggttctgggacgccacactgctcctgtaattctgatatggaggttcctggaaagcgccgtggagctctccctgaagccgctgtccttgcgaggaagggtggctgcctgcatctacacagaggccatgtatttgccttttcatggatgtgctaagcaacagctcacaggacggattctaactgcatcctccctttaggagggaaccacctgcggtgaatgagtcctgtgaacctgcaagtctcaaccattcctgggttcagggatttaaggagaacagaggagagggtccccccatttccttgcccttttgggaagctggggaccttcctctggtcagtctgtcttcagagggaagagtgagggaggcagcctggacaaggggcctgggatcctgggcagggcagggtccaaggacacaggccatctggccaggagacaccccacagcgctgggtcggctgcccaggatcttctgttacctctggccaacgtccaggcaggcccagcatgtcactgtgtgtaagtcagcctccccctccagactggaagccccttaagaacatctgcctggccctgcccatctgtgtgtgccaagcctctagcactatgcccggcacatggcaggtgctccaggagacagggattggagagagactcagagcccaggagctgccaaccgctgaagggagtaggaatccgctagtcattgaacctgtgctagggaggcataaaagatgggggtgggggcattttctagcggagcttccccgggtgagtcagtgcccatagccccctgaccagtatccccttccagcttcagcccccacccaagacccaccttctccttcctcccccattctgggacccccatcccagctgggccggggcaagaagaaggcaccctggcctcccgggctctgctgcagggggcctcagtgagcagcagatgaaaagctgcctccgctgggggctaatcctctcacctccacgctcccggtggctgcctcgccctgcggctcaggctgaaggatctcggggagttttaaatggaggagaaggagcatttctgatctcattttccagtatttcagctgtgccataatctatttaccacacaatttgtgtcactttgataagcggctgcttcaagactgcatttattaaaatcaagagcggggacagctttcaagtctctcaagaattgtaataaatgtttgaaattagtcattacggtgtttgccatggttcatatcatatactccatctcggtgacaaacggtcacatcttgcacacgttctttttgggtgatgatggtgaaggcttcactttgacgtccctgcatgggactcgggaggggacgccgcggggcgagagcccttccgggggcagccggggtcccccggggccacagctcagccccgtgaaatgctcttttagcctaagcttctgtacttaaagaggagtgaaatggcccagaaagacttttcttcccttccctcctcccccatctaaaccaccaggctcttatttcatcctgggtgacgaggcttctcctccaccaccaccccccctgcccagcagtggcatctaaggacgctgcaactttgcggctggtttactgtttcctttggggggttttgtagttgcaggaagtaaccctggccaaaacaatgtcacattcctaaaggctccagtacagcagggctccgagccctgggaaggggaaaggagggtcccagaggccatcagaggcttattcaaagactgtacaggaaccaggcacagagatgggatcccagagccatgctcctcctctatggtgacttgtggctcccaatcctaaagagacactcgggagatgacaatcagggcgtgaaaaccatcagcattggaggcaagctaggaatgaggcccagggtacccgaggccgggttccgagtgggcacggtggggagggccaggggacctacatttcctaataattgggggattttctgtctgtggggtcctcagagctggtggccgtctccctaggtgcccctggagcttggtaggcactgtctgccgtgggaaactctgggtggacacagcgggagacagacaccgaggggctgggggtgggggtgatgccactccgggtgacagcttctcttctatggagaaatacatctgaattttgcttgtgttcaggctggtgaaaggaagtcctttctgtttcacaaacatattgaaaacaggccttcatctcctttgagaaaagaggtttagtagggcagccacctaaagctcgcatgtttaactaaccttgttgggaggacgtgtgggagtgacagagacagacagacactacactgcattcacagtcctctgtttcacagttaacattcttacccaaagatgtgaatggtgaaaaagacatttttaaccatagctttatataaaaaaagaaagcttggccgggcacggtggctcacatctataatcccagcactttgggaggccaaggtgggcagatcacctgaggtcaggagttcgagaccagcctggccaatatggtgaaaccctgtctctactaaaaatacaaaaattagctgggcatggtgacaagcgcctgtaatcccagctactggggaggctgaggcaggagaatcgcttgaacccaggaggtggaggttgcaatgagctgagatcatgccactgcagtccaccctgggtgacagagcaagactctgtctcaaaaaataaaaagaaagcttttgcggggcaggggtctgaccttaagggaaatctgtcctcattctggaaaatacagaaaagaataaaaacatatttgagatagagtcttgctctattgtcccggctggagtgcaatggcgccatctctactcactgcaacctccgcctcccgggttcaagcaattctcctgtctcagcctcctgagtagctgggattacaggcatgtgccaccacgtccggctaattttaaacaaatatgtgttttaaaaagaggcacaattgtgcaagctggagatggctgtgtggatttccgtgtatttagtgtacttttgtgcaagctggagatggctgtgcggatttctgtgtgtgttagtgcacttttgtgcaacctggagatggccgtgcggatttccgtgtgtttagtgtactttcgtgcaagctggagatggccgtgcggatttccgtgtgtttagtgtactttcgtgcaagctggagatggccgtgcggatttccgtgtgtttagtgtactttcgtgcaagctggagatggccgtgcggatttctgtgtgtttagtgtactttcgtgcaagctggagatggctgtgcggatttccatgtgtgttagtgcactttctgctttgcaagcagttgcacatccttggttttcactctcctgcacgagctcctgcccccaccaccctcatggccgctacactttcagggtgatccctgcaccttaggacccagagcccagccgtggcaggtgctcctggaggttgccaaggcagaatccccgctggaaaaccatggctgccccttggaggcctaggtgcacgttcaaaagcacactggcgtctcatggcgtgctctttgcagggcctggaagggtcagcatccactttaaggccaagatctaccttgagaagcaatgtctaaaggcccatggtcaggcctaaaatcgatgagattaagaatctcctgcaggactgcgttggccttacctgtatgcagggcctccttctgcagccaaccctggaaactctgaggttgctggtttagcagggtaatgcctacaccctcattagcatctgatattattctggtacatttgtcacaattaattaatccatattggcacattattattcactcaagcctataatttattcagacttccctagtttttacctactgtccttttcctgtcccaggagcccatccaggaccccgcatgacactcaggcttcatctccttagactcctcttggctgtgacagtttctcagtctttccttatttttggtgacctcaacagtcgtgtggattcctggtcaggcattttgtagaatgttcctctattgggggttgtcggatgtttttcttatgattagatggaggttatgggtcttggggaggaagagcacacaggtaaagtggcgttgtgaacttgtcatatcaagggtatgcactatcaacagaacttgttgccagtgatggtgaccttgattgcctggctgagatcgtgtctgtcagggttcttctctgtggagttacctttttacccctttccatactgtactctgtacaaggaagtcactgtgcagggcccacacttaaacagaggagagttatgttccaccttctttgtttgtttgtttttttttttgagacagagtctcgctctatcacccaggctggagtgcagtgacatgatctctgctcactgcagcctctgcctcccaggttcaagagatttgcatgcctcagcctcccaagtagctggggctacagatgcctgcccctgtgcccagctaatttttgtatttttagtagaaacggggttttgccatgttgatgttccaccttcttgagagtgggatatgtacatacattctctgcaagctagatttacgtattcttccccgtttattgtcctatttaatcatttatttatatccatatagactcatggctatttatttcatactttgggtgatgacccaatgcaatgttatttactttgttgctcaagttgtcccagccttggccatcgggagctctttcagttggttcctgtgtccctttgacatatcccattaatgtggttgttttttgttttgttttgttttgttttgtttttttgtgtttccttactttctgatactacatcatgctccagactcattttgtatctttccaggcccaatccaagaattagtcatttctccaaggggccctggttctttttactagagaaggtagcaaccataggctggtacagagtgtgctcataactcctgggatgtcattttttttaggccctctcagcagacaggaaagaagatatacatgtttatactaatccgtgtatatatgcatctatacccctttctaaatgcaactacctgtatctatgtcaagtatagttcatctgtaaatacatatattaaatatgagttgatagtgacttctccaaatctcatccataattgcatgcatcattctaactttctctccttgcttgtttgtaacttttcattccaaatgcaatgtgaaactgtggtaaaggctggtttggctggtatttgttcctgcttcctggggaagagtctctaaacccttgaatttcctgtgataggagaatctttgttgttcacagtgggacccttggacaattcctggggttgtgctaaggaggtaacacatggtgggcccctagatagttcattctaacgagatgattcaagatggaggctggccaggccagaaaggccaactgtgtggttggagggatggagggatggggctttgaaccacgtggtatcagcttagcctccagggaggagattgagctccatcatgtggccagtgactcaatcaatcattcctacataataaaaccccatagaaactctggtcccctggcgggtccagcccatagactttggccaaacgacggatgaaggaatgcactcagagacaggtatccagtgaaagagcaggctaggggactgggctgcttacagaccctgaggagggtgctgtaaagagtcggcagccacagccttgaccagctggcactgcggatatttattcagcacagatttcatgacaaaggctttgagtcaacacacttgtggttaatcaacgtggtcaccacccccaccccagagagagtagtcttgggtgcagatgattaaagccaggttttgaggcctaagtaaactaacttatcaacatcagtttctttacatcctttcgttatctaacttaagctcttcagagaattcagctgccttcagccaaattttctttcaaagctttgcagacccctggccttctaaggaggtttgcatctttctacagtttttcccacctgatcgatctcctacagtccccaaagcttgggtgaacttccgaggttaacagcactcttcatatcatgcacatcagcgtggggggaaaatgatgcatcctgactccagagggagaacatgcagaagcttcacatttgggaccctccctggtcttgccttatgagtctcttctttcagctagtcctgattgtatcttttttgctataagaaaactgtaatagcaagtataatgctttcctgggtcctgtgaggcattgttgcaaattaccaaacctgagtgggtcatgggaacgcctgcatttgtcgccagctggtcagaagtgaggggcccccaagcttcattcagctggtgtctgaagtgagggcagtctggggaggactgtgtgcttgacttgtgaggtttggcctaactctggggaattaatgtcacaactgctttgtagaagctgcctcccaccatctgccatccatttacctagttgttcagttcctgtagacatatatactgttttcagaatcatgaacccataccagtatgggacacagctttatcaattacagcgcagtgcttgtgtacagttccttttgcctttagtttcacagactctgctcgttcccaaagttacttaagtgagcatcttttcctctgtccacattggcgagactgtttcatgcatttggaatatgtttggattctttggtcacattctgcattccaccttaggatctcctgaccttctaaatgacttcaaaaattttgcatacattaagattcgttctttgggccgtgaagttctgtgggctggggcaaatgcacagcgtcatgtatccactattacaatatcatatacaatagtttcacctaaaaaaactctgtgtttcccctcagttttaaaaaatgtcagatatattaaggtatagtttatatacaacaaaagtcagcctctataagtgtgccatttaaaacattttggaaaacgtatatacccatgtaacaaccatcataattaagatatggaatatttatatcacctgaaaatttcactcatgtccctttggggacattccctcccttcccagcaggcaatactgatccacttgctgctcctattattttgtcttctctggaatatcacacaaacggaatcacagattatgctactcattatttgtttctacacacagaacacttttgataccaaatgtgtgggcttttttccccaacagtcaattctccaactctccagacaccaactgggtgtccaatggttcaactcattaattgccgagagtgagtgtcagactccgcaggttaagggctccatcccacaagactgcccccactgcaaatattgtgggtacccagggtacccacacttctgtccagcttggctacacagtcaagagttcttatgccccgctccttggatttgataatttgctggagcaattcacagaactcaggaaaaacaattttcttacatgtactgctttattattaaggatgcaattcaggattagccaaatggaagaacatgcttagcgcaatgtatgaggaaaggggcagggagcttccacgcctttcagccacccatctgtcacttgcacatgttcaccaacccggatgctctctgaacctcatagtttagggggtttgatggttctgttacataggcatcattgattaaatcattggccactggtgattgactcaatctcgagccgttcctccctcctcgaaggtcactgggtggagctgaaagttccaaccctccaatcacatggttggtcttccctgcacccagctccaccctgaagctgcgtagggggctctggccaccagtcatctcattaacatacaaaaagacaacttcagggattccaagggccttagaaactcttgccaacttcagggattccaagggtcttagaaactcttgcatcaggaaccaaagactgagactacatattataacaaaagacactcctaccacccctatcactcagaaaattacaaaggttttaggagctctgtgccaggaactgggatgaagactaagtatatatttcttattatatcacaacatcacaccatgttttgtgcattgagctgcctctggcttctttcagttgacataatgcctttgagatgcatccacgtggttccatgtgtcaatagttatttcctttttagtatggagtaatctttcagtgtaggggcgtactttgcttgttgatctatttactagatatagatacatgcatgtggcaaattttgggctatgataagcaaggatcccctgagtgttcatgcacaggtctgtgtatgcacacatgtttttatttctcttgggctgagattcctgggtcatatgataagtgtatgtttagcttcataagaaaccgctagtttccaaagtagctataccagtattttttggtgttgttttttgttttttgttttttgagacggagtctcgctctgttgcccagcctggaatgcagtggcctgatctcggttcactgcaagctccacctcccaggttcatgccattctcctgcctcagcctcccgagtagctgggaatacaggcactcgccaccacacctggctaattattttgtgtgtgtgtgtgtgtgtgtgtttctagtagagatggggtttcaccatgttagccaggatggtctcaatctcctgacctcgtgatctgcccgcctcggcctcccaaagtgctgggattacaggcgtgaaccaccgcacccggcccaaagcagctataccattttacatccccaccggcgatgtaggagagttccaactgttccacattctcatcaacatttggtgttctcagtctttaaattttagccttctagcagctgcatagtggtatctcattttgtttttagttttcatctcctggattaatgatgcaagcatctttgcatgtgcttattggcctttttttaaaaagtatttaaaaggttaaattactatatatgagcaactcatggaccaaacctgttggtccatttcatagtgtaaacagtggacgtccctctctctcctgtctgccttctccattcaaagtgaccactttcaccgcctgggtgtatatggccttccagacctgggtctgtgcatgaacagtgtgcctgtgcctcttcccatgtcagcatccagaaatctaccttcttcataactgctgcagatcccatttttttaccagttccctaaacctagaatcatccttgtatcccctccctccaccctcttgtctaaaccatcaccaaggcctatgattttaccgccctccaaatatctcaatcacctcctctctccaccttcttcaccaccacccaaatctccatcacctcttgcctggacagtggtccccgcctcccaactcttctcccacctccttctactccattctctgtagaacaactggagtaaatttttcaaaatgcaaaagcgataatgtcttccttccccccttaatgctctcagtgccttccttaaaggtctgaagataaagcccaggtgccgatggtcacctgcagcaggtggtcctgccctcctccctgctgcctgcccctactttgagctccagcccacctgcccaaggtcagccatcagacacacggcagccctcggcacaggctgggaatgcctccatccttttcacccaggaaacccctgtctctcctgagatcttgccctgatccaccacttcctccgagaagcctcttctgatttctcctgatcttccattgccaggggaccttcctcttgttcctcctggttctcaatcccactgcctctccttcgtggcccacatcacggtcacacatttttgtggatccagagattgtctgatgaatgctcggcaccattccttcccagtccataggtcccatcccaagggcaggatggggggttgtatggggaggtgctgaaccccaacaggcacttagcatgctcaggtgagcaggcacctcgttcctggttgtagccaacacctcttctccaggcctgccttgcctcctctttccctggagctcgtgctctgctggggctcaggctggtgtctgcctggcagggcctcctgacagcgcctcacctgggcaaggcctggtgccacccagagtgtgggggccaatgtccagaggggacggaagccaaagtccagtcccaccaccatctcccagcccaagcaaaagtgtatccctcccacccctcctgtctgctccctggagccacacttctcaataaaatccccccagcaaacctgtctcaggcgggccctgtttctgggtcactcagaggctaagacgccaatttttcattcttatccttgggtttttatccattaggatacacaggtttctatgtggaaagcccactttgtagccattgtttgggtgtgggggaccccaggtttttgtgttgggtgtaggaatccttgcaggagcctcctttctctccacgggccatttcctgtcattctttcttgcctccctgtctttcccctctcccgctttcagaattgtcttgcgggcatgcccgctgctgatatttaaacatgcagatcccggcttctgttttgcatgaatgtgtgaccttgggtagagctgctcatgcaggatggatgtgttgtgcttgcattcaatcatcgggagcagcccaagccttgagaaaccacagagacccggtttcccatccccggcctcgggatggtaatgaacttctgagaaatggctcatcaataaatggagctaagagctcagggcagccaaccctctctgtcaggaccttaattacaatcgcagaaataagttggagggtgaggagccacagcggggaggcgggatgaggcgcttatggttaacccctgatttctcgggtagaggtgggtggacaggggaagtgaagtcctcctctctggggaggaaaggttgaggctgaggaggctgggatttgatttttgggagtaattggttcgtctgtctctttctgcctacaccaagctgagagcacagaggttttcccagctgggcaagacctggcccctgggaggctgccccgtgctccctgagagcccccggtttggaaggagctgcccctcgtatgttttgggtcacaccatggtggctgtgggggtctgtgctgggcccctgtgggcagcgaggagcagaggaaaggctgcagactgcagtggaatggtttgattctgctgtcatcttgaccccacctagctgggagaccctgggcaaatcctatcccctctcaaggctgtttctgaatctccacctgggaatcctaaaacctggctcttggggtcattgtgatggccagcaaagtatgaggcaggcctggacatggaagtggagccccttaatgtgggtttaccctctgccacccccgaagacccagccacaccatccctctcctccccattgtcagtccaaggctgactccctttgggggtcttcagagagggccctgctaggaactcgggaaccatggtcacctccccagcagctcagagggccccacaatcattccccctgcttgcccctcaccccctcaagagatgaggttcagccctgcctcagaccctgcctttgaccctcctgcaggctggacagaggctgcagggtggagggcgggtccagccttttctgcttggtatcttagtgattcccatcctgcactctgcaccctggatgaacaggctcggggtggatgggagacaggcggtgctgccggcctgcactgaccatccacgccccgagagctgtcttgagagaaggatgagaagaggattttgaaaacccctaaggtaactctcagccataagaaacgaggatcaccacaactgtccccctcggccaagaacccaccgggtgcctgcacttcccaggtccgccatttacccctccaagaaggaaggattagcctgggccactcaactggccaagtgacctgccaagagttccaggagctgggggtggaggtggcatcctggcactcctagagtccctttctcccagggggtgattgcccataaataaagtattttattaaaaaaaaatttaaaaattagataagacctgcttgactttttgacttttttttttttagaaggggtcttgctctgtcacattcagactcgtgtgtagtggtgggagcttggctcactgcaaactccgcctcccaggttcaagtgattctcctgcctcagcctcccgagtagctgggattacaggcacccaccaccatacctagctaatttttgtgtttttagtagagacagggtttcaccatcttggccaaggtggtcttgaactcccgaccttcagtgatctacctgtctcggcctcccaaatgttgggattacaggcgtgagccactgcgccaggtcccatttgactattgcagaaaaattaaaattcagataagcaaaaagaaaaagaatgaaatataaatcattctaaagcctgccacctggaaaacccactaacaccgtgtgatatgctccaggataattttctcaggggctttcctcctcccggctttataatcacgggagggggtgagtgtgtgtgcgtgcgtgagtgtgtgtgtgtgtgtgtgtgtgtgtgtgtgtgtgtgatgagagcaggcagcagcaagaagcaagatgctgagatgctgggttgtggcaagccgcctgccttggggccggaattttccatggcagtaaatccatctcttctgagaggtggtggcacagaggacatgagcgaggtgccagcgtcagtgcggtgtttactgcacagatagaatatttacagctccatctttggtgtaaaatgtggctctttcagaccctacgaaggtcactagaatgtcagggaatttatggatgttttatagtacatcgtgctggcgagcaagataacaggattctgttcctctgcacccagtgccgagagacacccagagtgggaaaacagtgagcagctggctgagaatcagctccccccgcctgctccaccccgcccaatcctgctcatttatgctcgtgtgtattctatttgtccgtgtgcatgtagaacatatgttactccaggcaggggaggggaggttcaagtgtgcagaagggagaacaattagaaaaatcatgaatcacgaatctgtttctgcttctactgttagggctaattatttcttggttttacgtaagagatgctgtcttaattaaagctggtaaggtcctgggtagattatagttctagattctagcatcacagcaaggggcagggaccttagagataataaaatccatagttgtcattttcaatgaggaaaccaaagtctgaagaccgtttgctgaatgtgctttcatgttattagagttttgggggaaagattttgaatgttacctcttgtgcatctcagaggagagctgagtttggctggcttctctgggagtggtccctaatcatcctctgcagttggtacctagctagttagaaaccaataaccagccaatagaaagccgcctgcttcctattgttgacacacacttctgccttcttacgggtttcttctgcccaggcactggttggatcctctcgaatttaagtcatgtgtttattcattcatttgcccaacatgtctctgggagggcatcctaattagagagcctgtgacgtggctctgggggacacagatgggaacaacacaaagccagtacccaaggagtttctatctcataaggcactggaaccactgttgctaagtcacagccagcaagtcccggcaactgcagagagctctgctcccagggacgcttccccagctacaagtaccaggccaggagcccaagctctgccatggtactgttcctcttggcatttcccttctctccttttagcttcagccacgctatctgtaaaagcattttgctgaattaagtgagtgtccataattctgggttgttctaactctaaggaggaagtggccagccagcctgaaaagtatgttagggttgaacctgttgctgatgtcttcagtacggggttggcatggaggggaatttggagatgacggaacattacagggaacaaaagtccatggaaacaaacaaccgggggcagggaaaccttcatggtaggatgccaaggaataaatacagaagggatgacagcgacagaaaggtcaccaacagatgctgacattagtgggtgagagcacaattaagatcaaggtatttatgcacctccaaacatctcttcacaaattgtttattaaatacaaagagaagagagtaacgtcattgtggaaacacctggcagacagcacctgaaccacatgattaagggtagtttcaccaatatgatgacaaagggccaggtgcctccagatatgatgcactggggaggacgcagtgtcacttccatggcgttcccagaaaaaatgcctgacctgaaccgatcactaagaaacatcagaagaacccaaattggggtatgttctgcaaaataactggcccatagtcttcaaaaatgttacggtaaaggaaggtgaagaaaggctgagaagttggttcagattaaaggaagctaatgagagtggccaatgcagcttgtggtcgccagtttggttctggaccacgcagctcatggcaagaaaggatattatttggataactggtggaatttaatatgaactgtggggctgggagtggtggctcacatctgtaatcccagcactttgggaggctgaggtgggcggatcatctgaggttgggagtttgagaccagcctggccaatatggtcaaaccctgtctctactaaaaatacaaaaaaattagccaggcatggtggtgggtgcctgtaatcccagctacttgggagactgaggtgggagaatcacttgaacccaggaggcggaggttgcagtgagctgagatcacaccactgcactccagcctgggtgacagagtgagactctgtctcaaaaaataaataaataaacaaataaataaataaaagactgtggatgagaaaataatatcttatcaatggcaagtttcctgattttgattgttgtacttcagttaggtaagagaaagtctttattctcagaaaagtgcacctagaggaagagacgtgatgtctcagacttactctcaaaaggtgcaggagaaaaagaatgtgcacagagggccgggtgtggtggctcacgcctgtaatcccagcactttgggaggacaaggtgggcggatcatgaggtcaaaagatcgagaccatcctggccaacatggtgaaaccccgtctctactaaatacacaaaaattacctgggcgtggcggcgtgcacctgtaatcccagctacttgggaggctgaggcaggagaatcgcttgaacctgggaggcggaggttgcagtgagccaagattgtgccccactgcactccagcctgggcaacagactccatctcaaaaaaaaaaaaaaaagaatgtgcacagagaaagcaagacggtgataaagcacaaatggaactccatggaatatggtggggtatgtgggagttcctgctgctattcttgcaacttttcctaatttgaaacaatttcaaaataaaaatttatgaaaaaaacgtaaaagcagctcagtacattgtggaatttaataagttattggtcttcaatcaaaacctacctgatttgagattgatctgttcatcaagaccataaaagcataatgcaaaggagccagtgcaattaaccaggccactgagactcttgggtcctttgccctttctctggtaagtactcaggtagcaaaagaaactcagttattcattacttctacctggccagccaaaaagttgtcccagtcataaactgaatcagtgacctctcttttccttcttccctcctttccttcttccttctttcctttctctcttccttctttcctccttcccttccttccttttcttatctttctctccaattttcatttcttctctaatactgaattaccagcattttctttctctttctttccctccttccttcttctctccctcccttcctcccttcctctctctctttctctttccttctttctcatttagcctccatgtcaataattgctttgatgtgaaagaacagcttcttcgttcttgctttcctggtttccatttttccagatagaagtggaagaaacagtcttgaaaagtgctcagtgagaaaaaaaatagcagagttgaaattaaatattgtaatgatgtaaaacagtaagcagccctgcttgacagccctgacagctatttgttctagaaaacagcatttatgatgtcagtcctatactggagtatgtttgaattaaaataattatggctgatagcacaacaaagatccctggaagtcaatcatccttcacaaataccacagatagaaccttcccggtggcgggaaaagactctgtcatagatggaagcaacaaaggacttgccggagatccctccagaaacccagatgtcctctgggaagccagaatgcctcacctctgaaagaagcccatgtgtgtatgacgtggcctctgaggccgcggtgcctgtaggactgagaggacaggtcactgtcactcctgggatacactgcgtccttctcaggtcaactgtgttgactgaattgacatgcttattattattattatttgagacagggtctcgttctgtcacccaggttggagtgcagtggcgtgatcatggctcactacagcctcaacctcacgagcaccactgatcttctcaccaagcctccccagtagctgggactacatccatgcatcaccacgcctggctaatttttcaagttttttacagaaggtgatctcattatgttgcccaggctggtcttgaactcctggcctcaagcaatccacctgccttggcctccaaaagtgctgagattccaggtgtgaaccaccgtgcccactgacccactgttttggtgatatcatatggacaacccaaagtgaacatctttgtcctctttctctattgcagttttaaatttgaaattaccaatagcgctgattcaatttttgtgccaaaaaggggatcattgaggacctggctgagatggcctgatgcccagaaacacttcttgacccataggtagacctctttccagcttattcctgttgtttaggatttaattcttgggctgggcatggtggctcattcctgtaattccagcactttgggaggctgaggcgggtggatcacttgaggtcaggagttcgagaccagcctgaacaacatggcaaaaactcgtctctactaaaaacacaaaaattagccaggcatggtggcgggtgcctgtaatcccagtaacttgtgaggctaaggcaagagaatcgcttgaacccgggaggtggagtttgcacgtgagccgagattatgccattgcactccagcctgggcaacaagagtgaaactctctctcaaagaaaggaaaaaaaaaaaaaaagatttcattctttccagagtaaagcacctccaagggggtcgcagcttggcacccttcaggcttaagggaagttgttgggtttgggacttaaagctactggggcttgaaggggtagggaaggagtgagaggagggtcaggggggcaggagataagcagagaaatggggggtttcctggggcccaaagctgggccctggtagtgggggagccttgtcccctccactccttcagctctgtgcaggctgggcagggcagagcttgcagatcctagcctgggtcagagccccccatgaacactccaccccttcatcctgctccttccttctccccttcctccacattctggacctgctcatcccagcccaggttgtgaaactctgttcaggctgatcagtttctctgcatgagctcaggactggggggtgtggaggaactccctcttcatctccatactgacctccctctgcatgtccctctgggacggaacagtgtcaccccagaattcccatctgcatggaactgcagagcagggcttggtttggagtaagggtcttcatagacataattgagttaagggtctaaatgcaatcaccctggatttagggtgggctctaaactgaatgactggggtctttgcaagagaaagaagagaacatttgggatgcacagacacagagaggcagatgggagccatgtgtctgtaagctaagaaaccaaggatcgccgggagccacaagaagctgggagacaggcctggacagagtctctctcagagcctccagaaggaaataacccccaccttcatcttgaacttccaggctccagaaccatgagagaatacatttctgttctttgaagccactcacttggtgacaatttgttacagcagctctaggagacttcctttcttaatgttgcaaatatttattgagcagctactgtattccaggggctctgcaacatcctggaagcaataccaagaccaggcagcccatgccacagcacagccctgagtagcaggcaggtctactgggactagaactctagatcccatagatcaggggacctcaagtccttgttaggaacctggcctcgaagcaggagatgagcggcaggccagacaagcaagtgaagcttcatctgtatttacagccactccccactgcttgcatcaccgcctgagccccacctcttgtcagatcagggcagcattagattctcacagaagtgtgagccctattgtgaacggtgcctgtgagggatctaggttgcatgctccttatgagaatctaatgcctgatgatctgtcaccatctcccatcacccccagatgggaccgtctacttgcaggaaaacaggctcaggggtcccactgattctacgtgatagtgcagttgtataatgatttcattatatattacaatgtaacaataatagaaacaaagtggacaatcaatgtaatgtgcttgaatcatcccgaaactataccacccacaactctcggtccttggaaaaattgtcttgcccaaaacgagtccctggtgccaaaaagtttggagacccctgccacagaccatcacatttcccttctgcagaccgaggctgggtccacagtgagtagacgatgcaccatttggcatcctctatgtggactgcagccgctgaggaaactgtagcattgtcccggttattctgacaccaggacacgttctttctctggtcgtaaactgagctccaagtgctttcgaattgcccagccctcagctctgaatatgaaatgctgttctttcacagagccagggaagttgcccaggaagaccaaataaaggctgggcacggtggctcacgcctgtaatcccagcactttgggaggtcaaggcaggcagatcacctgaggtcaggagatcaagatcagcctggccaacaaggtgaaaccgcgtctctactaaaaatacaaaaattagctgggtgtcttggcatgtgcctgtagtcccagctactcgtgagactgaggcacaagaatcgcttgaaccagggaggcggaggttgcagtgagccgagatcaggccactgcactccagcctggcaacagagcaagactctgtctcaaaaaaaaaaaagaaaagaaaagaaaagaaaaagaaaacatagactggaaaggggatgagctccaaccaaagagcttgagaaattgtgctttggatgaggagtcaagatggaaactaaaaggagaaaggtgcataggggagccccacagaggtgggcctgtccctggagggagcaaggcagggcctgcagctcccggtggtgagtcttctctctgacgctgacgatgctggctggccgagacactgccctcggcacagggagaggaaggagctgagcagagtgtttacctttggggctctggacgccacccagccggatctcgactttgaggtgacagccagctggtagaagcccttgggcatcaccaggagcacctttgggccacttttcaagcacatatggggccgagcgctttcctgcttgacatcatttgcttctcactgagaattcacaagggaggtgtcagtatccccatctcacagatgggaagactgaggcccacaggaaagtaataccttcctgaggtcgaatagctagtaaatgtaagctgcctggctttctgtgtccacaagagtaacacatggtgaaacgtatggctaagtttaaaaggcctcttttaataactggaaaatgacatgataactaagaagaaagcatggtgtcatatgtcaatcggcagcattttctctttcttaatggcagagacatataggtgcattttataattgatggtgtcttagattccatgatacacagtatttaatgtttattcattcaataggcatttatcggtgcctgctaagtgctaggcttggcaccaggctgtgcaaatgcaagtttgagaaagtgcctgccctcaaggagctgatgcctcataggagaagtgaggcagatgattgaaatatttataatgtaattgagaagtcccttgagaggcaggcaaagtgcctctgggtgcagagtatgacagattctccagatgggacagtgtttaagagggtaaggacttaacagggaggcagagacagagagcttagcagggcactctgcatgcactctgaccccatctccatctgatatggtttggctgtgtccccacccaaatctcatcgtaagttgcagctcccataattccctcgtgttgtgggaggacccagtgcgagttaactgaatcatggggcggttcccccatatgttcctgtgacagtgaataagtctcacaagatctgatggttttataaggggaaaccccttccgcttggctctcaatctctctctcgcctgctgccatgtaagatgtgccttccaccttctgccataattgtgaggcctccgcagccacgtggaactgtgagtccgttaaacctctctttcttataaattgcccagtctcaggtatgtctttatcagcagtgtgaaaacagactaattcactatctatccagatttcctttcaggtctggttgcctgactgcccattgagcccccagatatagggatctggccctatatctgcagcctccagtgcagagctgtgtggggaagcctggaatgaaggctgtgaggggtggggtcagagttcagagaaccactcaccctctacgagctgtttgcctggtgaggggtggtagaggcaggagtggggggagtgtattatgattattggtagggaaaaattctacgggcaagctccaaacatcacccacatggggagagagttttagattccacactctgatgcatggaattggggtcaaattccttctccccgactatcttcccagcacacaaaactctgtccacagcagcaaagtgggtggaagcaaagctctgatgatttagaagctagtcagcctctgagagtgattccctggacttgggtgcttactagctaggaaagtcattcattcactcttcattcattcactcttcattcattcactcttcattcattcatgcactcattcattcattcactcactcattcattcattcgctcttcattcactcactcttcattcactcactcattcattcattcacacactcattcattcattcactcttcattcactcactcattcactcttcattcactcattcattcacttactcttcattcattcactcactcattcattcatgcattcgtttgcttaaagatatgttttctgagtttctgcacgcactgggtgctgttctaagcatggagatccagcagggaaccggacaggtgtttagattttatcctgaatgggatgatgggtcgcttgggatttcaagtcaagagcacagcccctgatgcaggggctggggctggggatataggggtgagcacaccagccgcgcaccgaagggagaaggtctgtgcgtgtttatgtgtgggtgtcatggagtgaatggtttaattatagcagcactgtgcaccggcttcccattaataatgcagtgaatttcagcagcagattaaatcctataaaggagtaaattgcccaggaaagtgaagtaacatcgtggttgaggacaatcagtacattataggtctttgattagatagaagcccacggcagcgggcagatgggctcttagaaacgcacacataagagaaaaacaggaagtgcatcaatcaacttatcaacatcgcttaaaaggaatgggcttgtgctaaaggtgcaaaggctgggaaaggatcggctggtccagaaagattatggctctcacattagcaccagggctgggctgtggcttagctgcctgtccagagttctagctaatgggtctttaagaactttacttccctgcccactttctgatagttagaaagcccatccataaagtttcttgccttgggcagaaagtttctatccctatctcaaaacaacatgtaggggccctttaaggcaaaaaccttaagctatttcctgtcttctcttttgcattcaggaaatactctttgagctgctgaacactttagtgttcagccccttaacctaaggaggagctacacaaatgaagaactgtggaactgacctcagatgctctctcgttggaaattggcacgcaaaccacaaccacgatggcggcttctgagaggtggaggagaggggtgtggcaaagcagcaaggaagggggtctggggtccagcccagctgggacagtgaaggttccctgttcaagggtaagtaggccttgatcacctgcttcaggtttgtggcagatgaactgataaaatgcaatgaaagacaagaagccagtgtcagcacgtaacacgcatctttgatgtatgatcaggaacaaaatcatgggcagcccaagtggctgttttaactcagtgtggggacagctgtaaggagcaaaggtgattgttttatgtattcagccatcggagagccttgctttcaaatgctcactttctaattaagaaacaaagtatcctgtttgattggcagccacagtggatgaagtccccaagagggaagtaaatgccacctgtgatctgggagagaaagagaatcaaaggacacagaagctgctgcctcctgcccttaccacagccatcctgggaacatcgtttgtttgtttagtctttagatcattcactggctgattcagtcattccctggttcattatacattcattcattcattcattcataactcattctttgtttctctcatacatcaactaactcacaacttgccttactcactgtgacagctgacattcattgagatgctgtgtgacagacacaggcattgcagatgaattttgtagtttgtactaaaaactacaaacattactgagagaaaatcaagaaggtctaaataaatgaagtgatagactctaattttgaattggaagacttaatatcttactatgtcaattccttttaaattgatttgtagataaaaatgtaacccctattaaaatcctagcaagattttttttaaaaattgataaacgtattataaaacatttatggaaagccaaagggcctacaataaccccaacaatcttgacaagaacaaatttgggaaacattttctgatgtcaagattttttcaagatttgctaataggttgagtacttgtgtgtagcctgttgctccacaggagtccctacaagctgatatggcagaaacaatgctgtatgtgaaataaagatcaaggcaacagtcttgccctcagtaggctcccaggtgcgttcactgttctctgagctttcgtcttctctggctgaattctagtcctgtagccagtgccccatgcagctgctgggagtacccccagcgccgtttcccccacaccagcttatagggactcctgtggagcgcttttgttgtcatatattttatctctacatacattgtaaacctcacaatacaaaatatgaatgtataaacatatttaaaagtacttcttatttacccacttatttaccatttataatactcttccttcctttgtgtagatccagatttccatctcgtattttccttttgcccaaaggacttttattaacagttcttattgtactgttcttctggtgatgggtcatctcagtttttgtttgtgttcatttttaaaggtatttttgctgagttcagaatgttaagtggactttttttttttttgaggactttaaagaccactccattttctctgccttgcataattttatatgagaagtctgttgtcttatgtttgtctttttccccagctttcaatatttcctttctttttttgctattttccaacaatatgtttacattgtgcttagtggagtgtttcttctgtctggtgttagtcagacctctcggatctgtgggttttatagtttcatcaaatttggaacattttcagccatcatttttttcaaatatttttctctcttccgctctttctcctctccccctgggactccaattacatgatggtagagcatgtaatattgtcccacaagcagccactattgctcgatttattttttcagtgttgttttccttttgttgttgttgttgttttgataattcttattgctgttaatttcatggataattttatctgatgtgtccaatctgttgttaataccatccaatgtatctttatttcagatattatactttttatctctagaagtttgatttttgacttttctacatttttcatttatcttatcatgttcatgttttcctttgctagctgttttaacatcctatttggctaattttatcatctgtgtcatttcagggcctttttcccatttcttgatttttctcctggttgtgggacatatattcctgattatttggatgccttttaattagatgctagacattttcattttactacctttcattgtattcatttaaattgttgaaccatgttctggaacactgttaagttacttgaaatcaacttggttctttggggaataatttttaaagttttgctagagttataaatatttgttcacatatattcattttataagccctgaacacatccagagtagcatttattctggggccagtttggtttcaaacaaccctaagacaatgctgaagggtggagtcatcagaaataattttattatttatattattttacttcatatttgaaaggtattttcactagatatataattccaggttaacaattctttctttcagccctttaaagatgttattcctttatttattggcttctagttttttttgtaagaagtcagttgtgattttttttttttttgagatgagtcttgctctgttgcctgggccggtgcagtggtgtaatctcggctcactgcaacctccacctcccggattcaagcaattctcctgcctcagcctcctgagtagctgggattacaggcgcatgccaccatgcctggctaatttttgtgtttttagtagagatggggtttcactacgttggccaggctggtctcgaactcttgacctcatgatccacctacctcagcctcccagagtgctgggattacaggtgtgagccacagcgccctgcccagtgatgattcttattgagtgattttttttttcctgtatgcaattaattttttttggctgcttttacatttttctctttatctttggttttcagaaatttgactccgatatgcctagcagaagttccttcgtgtttatcctgtttgaagtttgttgagattcttggatatgtggattgatattttaaatcaaatttgaaatttacagttactatttcttcaaatattgttttctgccccattttttttatcctctctgtttgggactcctgttacatgtattttagattacgtaacattgttccacaaatcacagcgattctattaatcttgttcactcccacttccctttgtacttatgtttggagagttcctattggcctgccttcaagtttactgatgctttcttttgcaatgtatctgctgctgttaagcccattcagtgaatgttacaatttcagatcttttatttttaagttctacaagttccattcagtttatatatatataatatatatatatatagtgtctatttctccgttgagattccccatctgttcactttttacatatatattcattttatttatatatatattttacatatttattcattttacatatattcattttattcatatatattcattttataagtcatgaacacatttataagggctgttttaaaaatcgtgtttgctaattcccatatttatattatctctgggtttgtttctattgacttggtgtttctcttgggtattttgtcacattttcctgcttcatatatctagaaatgttttactatattccaaatattgctgacacattattgatcatttggattattttgtctttatttaaagagtgttggatttttttctggcaggtagttaatttgctggtggatcggctgaatcttgtcttggcttggttttaagctttgttaacgtggatctgaagtagctcttactctaacgctgtagtagccctattcctaaggtgtggacttttgaaatctccactaaatttttgaatgttcagcaatgtctccccactttggctggtcagaacttcaatgtctcccagcacggtgctgggagacattgtgctttagaatctccatttagctcacagctctctaatagttgttctgtgtcaggccttatgtagtctcctcctaagcataacctgcttagtatttgaccaaaaactctagggaactccatgtcaatcttgggacatacttgtatgcatagctctctctactctggtaccctgccctgcaaattccagattcctcagcaaccttgaattatttttatttttattttttattttatttatttatttatttacttatttattttgagctgcagtctcactctgtcacccaggctagagtgcagtggcacgaccttggctcactgcaacctccacttcctgggttcaagctattctcctgcctcagcctcccgagtagctgggattacaggcagctgccaccatgcccagctaatttttttgtatttttagcagagatgaggtttcaccatgttggccaggctggtctcaaactcctggcctcaagcgatctgcccatcttggcctgccaaagtgccgggattacaggtgtgaggtaccactcccagccagcaaccttgctttctgttttctactttgtccacccaatgatagagctttctgtttgggttcttctttcccatacctcagtttggaaatgctcccaggcaaaaatcctaggtagaaatggatcttaccttgtatgttttcatcctcccatggatcttagcctcgtgccgtattctgcccaaagcctgttgtcaaaagcctgcctgaagtaaaactgctcctttacttattgtaccacctctgtagtagtctgtagcaaggcggtatgtctgatgcccattatgctaccacggcaaaactgctaaatctctttctagctatggaaatgttacttctcagaagccacctccagcacccccaccctggccttattgtacttatctttataatctaattggcatcacaagttcatgtctgaaacagtcattgacgaggtgagtggaatcaccatgattaattttgactacatcaagctcccgcttgggctgggggaagggattccccctccctaagcacatgcatgtccaggatctgggcatgatcaggttccattactaagggagaaggggacaatgagtgtgggtggctcaagggtcctgcctcccttgtcctctaacttctcagtttccagaccccatctcaggaagcccagctctgctcttatgtcggtcctcaggagtttgtgtcttcattgtaaccttctgcactgggctgaatttgtcccctcaaaattcatgtccatccaggatctatgaatgtgagcttatttggaaaaagtgtctttgcaggtgtaatcgggttaagatgagggcacactggattagagtggccccgatccaatgactcgtccttataagaagaggaaaatgtgggcacaaaaacatccacagagggaagacaaagccagacacagggaaggtggccacgtgaagacacaggcagagggtggaatgaagcactgataagccaataaatgccaaggtcagccagcagccaccagaagctagggaagaacatggagcagatttttccctccaagtctccagaaggaaccaaccctgccactaccttgactttggactgctgggctccagaactgtaagaggagacacttctgttgttttaagccacccatagtttgcagtgctttgttagagcagtcctaggagatgaatatacattccaataacaggccattttgttgagctggtttgagcagttttctatctctttgcttaaagcaaaggaaaatccttcaccatcatgctcctcttcctccttcaccttctttggaaattccacttcctcctgtcctgttaagtctgcacaatgccctcaccagccctccttttctctcaccagggaccagcttttgcccttcacatgcccttggccctcagccgcatgacctctatggtttatgttgcagactctgagggacatctgttctgtcttctcccagtatcggggtcccactgtcagcacccagagagtagacagactggtgtgttacacagtgtgtgatggaccggcactgtgatggttaattttatgtcaacttaactgggctaagggatgcccagatagccgggagaatattattctgggaaggcctgtgagggtgtctctggaggaggttagcatttgaatcagtagtttgggaagagaagatccacccccacccacgtgggcagtcatctatcaacccttcgagggcccagagaaaacacaaaagcagaggaagagcaaactctgtctccctccttgatctgggacatccatcttctcctgccctgacactggagctcctggttctcaggaacttcagactccaggacttgccccagcagcaccaggttctcaggccttcagcctcagactaagggttgtgccaccagttcacctggatctcagactttcagactcagactgaatgacacctccagctttccacgttgtccagctggcagatgggatatcatacgatttctcagcctccatgatcattgagccaattcatcacctgtatcaatatcaacatctatatctatatcatctattaatatatctatgtctatttctatactatccatttctgtctgtctatccgactgtctatccacccatccatccatttatctatctatctatccactgtctatccatctatttgtctatctctgtctgtctgtctgtctgtctgtctgtctatctatctatctatctatctatctatctatctatctatctatatatctcctattgattctgtttctctggagaaccctgactaatgtgaggcaactattgggagtggtttggggctgcagaaatctgtgaatctgaagccagtcaaccagatggagtctggagaggccgagccctcagcgccagggccctctcccacactccagctccgcatttggagccaaggcccttcatctgctaaatgcaaacccaaagtgaagggcccccgggacccaggattatggacactcaaaactaatgccaaataaacaaggcaaaattatttgtaattactcctaaagtcatttacttgtatcagtaattgacctgtgcattctttaatctttaatgcgcttttaaaattcagcctcagggagtcatcttgcttattgacatttgtcctggtgaggactctggaggcatgaggctttggttaagatgtcttaaaaagaaataaccaatttaggaagccatgactttcacacatcagggtaaggaggcacagggagaggggctgtagctgcctgtgttttccctggtcaggacaacaatggtagtgacgacgatgatgatgatggtgacgacgatgatgatgatggtgacgacgatgatgatgatgatggtgacgacgatgatgatgatgatgatgacgatgatgacgatgatgatgatgatgatgatggcggcactaagatttattgaagaatctgtatgacttcaattaatcctcttaaggaagctttagaataggtgctattatgagcttcattttactggaggagactatggcatggagaagctacatacatttccttaagatacgctttgattagatactgaaggcaaactcgacctcacatctgcagaagcctcaaaccttcatcctactgcccctgatagggtggccaacaaccactgccttgcaaagcggccgactgaggatgccatacctgcaggtcaccttgggaaattacctgtctcatctgtggttttcttgtctgcggaatgggcatcgtttttcacacgttattgcaggtggtgaggactacatgagattacacgaacgcggctgctttacagacacagctctcttagcttccttccatgcaagactggagcaaaggatctgagctgggtgcagatggggtttttccccctcatcttctgaagatggaaatgtggacagacactttgctaactctttattttacccctttgagtgctgccaaagccagtgtttagcattgcgaaagaaaccacacggggctagtttgctgcgggagttataaatctctcttggaacagatttgaaaactggtgacacagaacaattgcccctggggtcagcagctgggccatttgggggccagacaccacctttaggattcccggtgacgcctcccctcccatcctggttccaggttctgccaccaagggcaggagaatgctgaggagcatttctggaacctctagacttccgactcccccgctctgaaggtgcactttgaggagggctggacagtggaggctccacctaagtggtcctctgaggcctgaggtcgggtgaattctggagtctccagaccttacccaagagcccctgtctgtcctctttccccattagtgtccccagcgggccttcctgtccactgccgcggctccgtggagacccacccggccatctccaaccacattgctcctgctccaaccccaaagcccaagccctcctcccctcccagccatgggtgctgacacccccacactgttccttctagcctgaaccctggcacttgcctttctttggggcctcagctctaatcaggtgcaagctttgctaatccttcctatgagtgacctcttgtgctcctcctccctccttcctccctcctccatctgagattctgcatcagctccatcctaatctctaactggcctctggatgaaggagcccaggtgagcccctccatttgctgacctccccctccccgctgtgggccctgcaacctccttgagctggtccccacccacccacatcttcttcttcacactccccagcactcagcacaccccagccaaagccacgttgtcactaagccagaccatgtcacacccagcccaggctcctgccttttgggtgtaatttcacagttgacatcctctgctttatttcgagccgagctgagctttatttcgagctgagctgccccttcagctctcagccagtttcctgcatttgcagccctggcttctgggtacctcaccaacctgccacactccctgggccgtccgcaagaacccagccccgtgcccccttcctggaattcctcaggagcatggagtctgtttcacatcggccactttctggcgtgtcttagaccagccgcctgattccctttcccggacggcgagcgccaggaatgtgccatccgcattccactttatcttgtatctccctgggctcccagccccgcgccgggcgaagagccggcactcaatcaacgcctgcctaatgaattggctgaataaattaatttggggttcattttcccggccccctgcttggatggggaggctgcctccctgacctgtggggtgaggcccctgagggcgggacaggactgtgcactgcctagtacattaaaccgggtctcagattccattaaatcgagggggagggagtgcctgccgaggaggctcaccccagaggccctgcacgcggctcgggctgtttaaggaggttaaaacgagaggagaaggctctacagctaattgtccttgtgcgttaatcacagtgtgctgcgggggcgcctgttagaatgtgttaatttggtaattaccgaggagggggaggctgctctgtaaccctcggcctttgtcattattttttaactgaaatatgaaatggaaatggaaagagtgagaaattccagccaggatttaaacccagatagtggaaattcccatcagttcacgtcctcctctgccgctgctggaatgccccacgcaggtgtctcgtcttcgtttctgcccagcctagatgtctttgcccccttttgagcttccgggtcccaacactgagaggggctctgtcaccttctgtttcttggagagacaggaatggcggccacactttatgacagatatcataatagcccaaagattccagaccccggggctcaagccctcctccttgcaggtctggcctgtatcccccacggccttcgttaatgggctgggggctccccactcccccagatggaatcttctcatctccctgctcaggcaaggcttctttttgcctgttgcactaactatggtccttgatttcatctctctcctccctgtttccccaccccaatcacagctcagataccaagtatgctgggaacaaccaagacccagggggccgcttgctgctagcttattgtttgcggagtcttaaatgtgcataacagctgtgcacagtgttgcagagccatgcacgaagcggacattgcaaccaaccaggactgggaattccatcttctctgctttcaagagctcaggcctgattggtggtcctacctcccaactatctctggaatctctgcttttctcctaattccattgctgcaaagagtctagatgaagactttgaacttttgcctggacacctccagtatcctgatgaagtcgttcccttcagccaggctctgtttcctctgagcctgggtggaaacaaacagagcctggtcacccaaggacatgagtattgggaacacggactcggatgaaaatcccaaaaaaagccaaagtcctcccagcggccctcatcctcagtgatcaggccccgttgctgctcggacctctctctctctgctccggccccgctgcctgctctgctgcactgggcttgtggggctggggtggctctggacactgggatatttttatttaactcccaaggcaattctaacgtgcagccgggtggacagccaggatctccaggagaagttcacgtccttctctgccgcatctctaacccggcctgggtctatggccccggctcctctccctcccctccccatcttcttctctcctcccagccccccacgcttaaatcacatcaaacctcagcccgttctcttttcacccctctgtgcctttgcacttgcaatcgttcctgcagaaaagaacctctgttaatgttttgggatttcctccagtctgggcagcctcccgtcatctcctcagtggacacgtatcgaccccttctcgttcactgtcttacttcatctttcagctccacagagcagactgtgtttatctctaatagtcctcgttctgctgcattttaatcatttgtttaccggctctaaatgtggaaatacaggggctttggtgccagcagacctgggttggaaggctaagttccgccacttatattctgtggctttgcgtaagtcacaaaacagctctgagcctcagtttcctcatctgtaaaccacaagccttcactcaacccattttttattgagcacctactaagtaccatgcaggtcagacccatcttctcatttaacctttgcagcacccctgtgagctaacacatggcatttatgaatccaagctggggaggggaccagctccagcctggctggccatagaccttggccaaattgctcaggaccaccccaccccgcctgccaactgctgtccccaaccctggatgtcccatgtttgtctctggttctgtgggtgagacacccactccatggggatgttgtgagggtcgtgttcaatgtaggcatgtgtgacttaacactgggaaatgttctgagacatttttcattgtgtggacatcacagagggtacctacacaaacccaggtggtacagcctgtggtatatggtgtatgcctgtggacccaggctacaaacctgtacagcacgttagtgtactgcagtactgaatgctgcaggcaattggaacatggtagtaggtattcatgtttcttttcttttctttttccttttttttttcttttttttgagatggagtcttgctctgtcgcccaggctggagtgcagtggcacaatctcggctcactgcgacctccacctcccaggttcaagcaattctcctgcctcagccccccaagtaactgggactacaggcgtcagccaccacacccagttactttttgtatttttagtagagactggatttcaccatgttggccaggatggtctcgatctcttgacctcgtgatccaccttcatcggcctcccaaagtgctgggattacaggcgtgggccaccatgcctggtattcatgtttctaaacacatctaaacatagaaaaggttgggtcaaaatacagtattataatcttatggagccaccatcatcaatgcggtctgtgctgacgcaaatgttgttacatggtgcatgacagtagcacctgccgagcactgagaacaaggaagccctcagtgcacgttagctgtcattgtcatcactgtcttctcatcacctgccaggtggagaaatggctcttacaccttcagtcttgtaggattgttcagaagattaaatgagataatagagtaaactgcagcatacaataaatttcttaataaatgtccctttccttccttccttttcccctgaccccactacctcctttagggactctgttccttggacaatgattgcttcctttatgctctggagtccagcagagactgacacacagttggggctaaacacgtctgagggtgatgaaactcccatttctgacgccgtcaacttgttttctgtaatgttagccctgccatattccagctcgacagagcttgggcagcccgaggtggtgactgtatttggccatcagccatgtcccttgcagggccagtctctgaggtgccatgagaccttctgtgcctggcaagccggggcacttcggagaatggcagctgcctggtttctcaggggagcaactacattcctaagtcgcttggggatcgcttgacttccctcattcattcacccatccttccatccatctattccttcatccagcaaattggaccccttccgtgtgccagacactgttctgagcagaagcacctgcccttgaggaagtgacactccagtggggagagacaagtaagctcacaaagatctatctgcaaaatcaaattccaggtagtgatcagtgccacgaacaaaaataaaaatgaataaagagatgtaaaatgatttccttccccaagggcagaggattctttctagcaggttatttggaaaagttccctctgaagaggtgacatttgatcattgttaaagtcacatgcatcattgtgaacatttcacaaaacacagaagaacctaatgctttcgcacaaaccatcatctagaaatcacaccatctcaacatcttgtcgtttaaaaattgatatataataatggtacatatttctggggtccctgtgatattttgatacatgcagacaatgtgtaatgatcaaatcagggtaattaggctatccatcacttcaaacatgtatcatttctttgccaatgccttgtcttttgtcgtcttaaagtacagatttgcatcatgctttttaaaatttaacattacactataattattttgtagctgtgtttatgtttttctgttttcaagtatcaatatatagtatggatttttaaaaaattggtactgtaaatgtacatgaagtttttctgtctttacaaaagaagtgcatattgttgtatgaattctagaaaatcaagataaggaagaaaattaaaatccttcataatcctactcattgagcatactggtctatgtctttcccattttttccttccttataaacatggaaagacatcatacctagagcatgttcagtttgtgtctggctttttcataatcatactttaaaactggaaagctggtgtgtgcaagtggcagggggagcttacctcacaggacacagcagcagaacccatgggctttggcccactctgcccctgactttaatgttgccaagtcatttaatctctgagtcccgggtttcccgtgtgcaagagggagtcataagtcctctctggacctcaggcctgggctaagaaccagagggcagagagtggccctacaaggtctcaaggaggagggatgcctctctgtgaccttgccctagtgtgaacatgcagagttgacttgggaaagattccaagcacctggggatggggtcatatgaagctcttccaagacacagtggctcacgcctgtaatcccagcactttgggaggccgaggcaggcagatcacctgaggccaggagttcgagaccagcctggccaacatggtgaaaccccatctctactaaaaatacaaacattagccaggcatggtggcaggcacctgtaatcccagctattcgggaggctgaggcaggagaatcgcttgaacccaggaggcagaagttgcagtgagctgagatcacaccattgcattccagcctgggcaacaagagcaagactccacctcaaaaaaaacccaaaacaaacaaacaaaacacatgtattgaatcttcgctttacattttccttcttttcttctctttttttttttttttgagtctcgctttgtcacccagcctggagtgcagtggcgcaatctcggctcgctgcaacctctgcctcccaggttcaagcaattgtcttgcctcagcctcccaagtagctgggattacaggcacacaccaccaggcccggctaatttttgtactttttagtatggatggggtttcaccatgttggccaggttggtctcgaactcctgaccttgtgatctgcctgccttggcttcccaaagggttgggattacaggcatgagccaccgtgcccagccctacatgttcttctttaacccttgcagcatctctttgaagttggcattactcagcccatgggacagatgaggaaaccacctcagccagcctaggaaacctgtcctgagtcccacagttcaggagcgatgtggggatttgcaccaggatccacatggcccgaggccatgctctgaactgttcagctgtagaggataaactgtcctggcgtctctatgaagcggtgcagtgggcaagctgcccagagcgtcctgggaagagcacattttgtttgctgtgaaactactcaagttaaattgtgagagagaatccactaaatgagtcctaacatttccttctctccgagttgacactgggccctcctggaaacagaattcaatgccagaaagctgtcagccagaacgatgcatcggttcccctcagtccccctccgcttaacccatgtatgcctgaggttgcaattttttgaatttttgcaatcagaccttggtgctgaccttgagcagtaggctgtaaataactcccccatgcttagcgttccaataatggaacagtaggcataaacagacccagggactgacacatgtagccggggactgagaagccctgattgagacagggagcgcatgtctctgatgaacccgagcttattcatttagaaaaaaattagaggctgggcatgatggctcacgcctctaatcccagcactttgggaggccaaggctggcagatcacgaggtcaggagatcgagaccatcctggctaacatagggaaaccccatctctactaaaaatacaaaaaattagccaggtgcggtggcgggcgcctgtagtcccagctactcaggaggctgaggcatgagaatggcgtgaacccgggaggcggagcttgcagtgagtggagatcgcgccactgcactccagcctgggagacagagcaagactccgtctcaaaaaaaaaaaaaaaaaagaagaaaaaaattagaaatattttcttaatgaaaaagtaacattttcaaaatataacaaataaattagtgacaaaaaatgatttaagagtacctctccctctcgccccaggcccccaagtcctccttctcagaagcaactgttgagaatttctagtgtatccttccagaagttccttgtgtacatgtgctcatatatgtttgtgtatctttatacaccactctgcatcctttgcaaataacctgtctgatctcttttaatatcagcgcatttgcatctgcctcagtcgttttattggttgcattattccactgccttgattaggccctggtttaatctttttttttgttttttttttgaggcggagtcttgctctgtcacccaggctggagtgcagtggcgtgatctcagctcactgcaacctctgcctcccgggttcaagtgattctcctgcctcagcctccagagtagctgggactacaggtgtgggccaccatgcctggttaatttttgtgtgtgtgtgtgtatttttagaagagatgaagttttgccatgttgaccaggctggtctcaaactcctgacctcagacaatccgcccaccttggcctcccaaattgctgggattgtagacgtgagccactgtgcctggcctggccctggttcatccaacgagccccatgctgatgggagttttgggggcattttacagtgctctactctttacagatgctgctgcaataaacattcccgcacaggcatctttggaccctggtatggtttggatctgcgcccccacccaaatctcatgttgaattgtaatccccaatgttggaggtgggtcctggtgggaggtgattggatcatgggggtggtttctcctggtttagtaccaccccctggtgctgtcattgcgatagtgagttctcgtaagatctggttgttttaaaagtgtgtaaactgccccgtcctcccgaccctgtctctctcttgctcctactctggccaggtaagacgtgcctgcttgtccttacccttctgccattagtttaagtttcctgaggcccccgaagaaggcaagcggatgccagcattatgcttcccaaatagcctgcagaaccgtgagccaattaaaactctataaattacccagtctcaggtatttctttacagcagggagagaacagactaatacaaactcatatccaaatatacctaaaagccacagcagattttattagtgctctgcaagtcctaacaaatgtggagtctcgctctatcacccaagctggagtgcagtagcatgatctctgctcactgcaacctccaccttccgggttcaagcaattctctgcctcagcttcctgagtacctgagattacaggtgccggtccaccacgtccagctaaattttgtatttttagtagagacagggtttcacttgtccgggttggtcttgaactcctgacctcatgatccacctgcctcggcttcccaaagtgctgggattacaggcttgagccactgggcccagttgacaatagaatcctctatgtagaatatccagtagactcaactgacaaattattagaactagtaggagaattcagcaagatgactagatagaagctcaacataaacagaatcaattgttttcacacactccagcaataactaatcagaaaatgtaataggaaagaaaaagaagtgaaatttcggggccaaaatgtcctctaaagcagtggttctcgaacttcagcctatatcagaattacctggagggcttgttagaatgcatattcctgggccccacctgcagtttccaaccagcaggtcctgactggtgcctgggaatctgtatttttttcaagctctgggtgaggctgatgctgctggtctttaaaccctgctttgagtagcaaggatctaaagatattattcctgtttccactgcgcctattcccaaaaagcctttgctgttttcccagttggatgggtgaaaaatcttattttgtggttgtaatttgcatttctttaattatgaatgaggctgaggctctgcccacatgcttggccttggccttgattttcataccaccagatgttaaagggacagctatgggttgaggtgaactcacatgaccagatggcagcgccatcccccattggattctgcccacctctgcagctatgaattcccatttatagtgagaagagaccttgaaggccccacaggacagtccctgcctccaggaagactctgttccatccatccaaccgggagccgggagccagtactcacagcccacgtaagagcattttccaacattgaactacctttttggtggaaagagcaaagaatttgaaagcagaaaacctactatctcaagccacaacttcactaaaaatgcaaagtgacgccagatgggcaagtaagttgaattgcagcagtgctagcatctcaggcaagggctttattacgtatttaaagcaatgctttgacactcgggaaatagcaagatggatcggaggaagctagagagccgccctgtgtgaggtgagcgttttcatgccatttaaattgcgcaattttagcaatgcatcctggcatgtttgttaataaagacacagagccgaggcaacacatagtgtttttgtttcagcccattgtctatctccagagaaatgttattggaatcatattgcattttcaggtccgatgaagctgcagtaatataagcattttatgcaaatgtgttgtggtggaaagaatggcatgtcatgtgccataaatcttaaggtaaccgcagcccttgttactcctcagttttaacacatcctgataggaggcaattatttcggaccaacaaactgcctttcatagaagtttgtctctgcttgaagctagagcctgtttactagtatagatttatgaggtctgatgacaggccagcccaggtggccatgagcatggccatggaaggagatgaaggcttgcccattcaccattcacatatgcatccctctctccctccatcccttcatccctccatccatcactccatgcctccacctctccatccttctatccctccattcacccatctatctgtgcatacattcttccatccatgaatccctctatgcttcctccatctatccatccatccctctattcctccttctgtcgccccatccatccactctccatctctctattcctccattcacccatctatctgtccatacattcttgcattcatacagccctccaacccttcctccatctatccatccatcccttcatctgtcgccccatccctccacctctccatccttctatccctccattcacccatctatctgtccatacattcttccatccatgcatccctctatgcttcctccatctatccatccatccctctattcctccatccgttgccctatccctccacctatccatcactttatcccttcattcacccatctatctgcccatatgttcttccatccatgcatccctccatcccttcctccatctatctatcccatccatccatccatccatccatccatccatccatccacacattcttctctccttccatctacctatctattcttccacccatccctccatccacccatctctttgtccttctgggagttagaatcaagtcatggaaaaaagggctctggcctaaagctccagtgctagagcagctgagatagagtcttagctctttcacttaccacctgggtgatttggggcagaggtcttaacccccctcagtttcagtttcctcatcagcagttgtcagaatcaaaacggagtccacgctcacaaataaacctggagaagaccataaagagagggttattatgcataaatgcctgataacaaaaactgtccaaaagactctgcaaaatacacaaccttgtacaaaggtcatcacaaccttacacaaaagataccttctgcatgacacctgctcagaaatcgcctgtccgctctggcatcacccttgttattggtccttgtagctaagggtaatcatttcagaacaattatttaatcctccttattttattttattttccctttaatactctttgccttgctttacctccctcacatgtacattgtttactacagcacgcgtcttcccattgcgatgccctattcatgaatgagtatctttttcttctagggagctgctctctgtgtgttatttacgttgatggcataatagagatgacaatggctcttgggaggatcaagtggggcaatgcatgtcaaatgcctagcacagtgcttagcgttcttctttctctgtacgcttacccattataacgtttgttccgcaatttaacaacaacaaagccactgggtacccactccttagaaggcccagatgaaaagaacagactgagagtaggggcaggagtggaacatgcttggggtgtggggatgccctgcagattggaaagggctctgcaggctctcggaacagggtctgtctctgtgctgtgtctgtggccttctccgtacattgcccacaaagagtttgcagcgatctttcaagggaccagtcactctccaggtctcctctgttctacccaccagcatccttcacttggagatctgagacaccttcccggagtgtggaaaaagagaaaccaccactccaagtctgtcttctggtttgacctggggccagggccttaacctctctcagtttcagtttattttgtttgttttgagatggagtctcgctctgttgcccagactagagattgtgcaatggcacaatctcagctcactgcaacctctgccttcctggttcaagcgattctcctgcctcagcctccctagtagctgagattacaggtatgcgccaccatgcctgctaatttgtttatttttagtagagacggggtttccccatgttgaccagtctggtctcatactcctggcctcaagtgatccacccgcctgggcctcccaaagtgttgggattataggcacagcttccctagggatttttcaccccacctagagatatttattggccgcttcatatatgaaggcagcagggataactcagaggtagacaagaccaacccctccctgccaggagccagcagtcccacgggaatggaagaagtggcccaggtgactgtgacctctcaggtgtttgcggcgtgctggagaggtggtcgggggagtggagccttgaaggaaagattggttttgctttctcctcccatgacgaagcagagatgcctggcgttccatgggcgtggtcccgccctgaccttgttccacgtccccctccggctccaccatcaaaatcaaggactgtggatatttcacataaatgggatcaggccacatgtggcctttatacctgggcttccttcactgagcgtgttttcaaggtccactggtgtcgtcgcgtgtggccatcgtgtggattcgtcacattgggtttatccattcatcagttgggttccttcaaccttttggctatttcgaatagttgccatcactgtttcttaaaatgtgactgatgctttgttgtctgacttctctgctggaacggaagtcttcagggggctgggggtgggaggggttggttttattgctgtcatatccctcaggctcataggttgtaacagggagcccccaggggatgcaggtgggccggtgagaggagacacccccatcgtcattgcagaatgatctcctgcccagcacaccccctgccgatcctccagcagccccatgctaaggaaataacagcctccctacccacctcccccagccttcccctctgctctctgctccctagagttcctggaataaagtcaaaggagacaggaacagggcaggtatccacctgctcactctctccaatcaactctttaggggcttttgctatcaatgcagccctggaagggtatagatcaattcccctcacctttccaccctcccacccacccatccacccacagaaatcattgcagctggaaaactgttggatgtggagagtaaatctgcaaatctgagtgatatggacaaaaaggcatttgaagttcttaggaggggaatcgtgtagccttgagaggcgtgaggtaaaaatggctgtggcttggaccccgttccatgtgaggaagccagggatcttttctttagaagtcttgctaatgtggtatttaaaaaaaaaaaatcaatgccacattgccacgaatggacgcatctattccaggtagagaaggctgttgtctgggaagcatacagcagctattataaacactgaaagtcagttgtttagcccccattcatgggcactctctgaggaccaggcacatggggcttctgagagcataagggagctctccatttaggaggaaccaggtgatgagcaaacaggatccattgaggctctgagatagacgcttccacctggcgtccaacccatcccaagaactctgatgagcaagtgcttcccattttgcagaaaaggagactgagattcagagtggagaagtgagcaccaagctcattcagcccattttacagacaaggagactgacattcagagtggagaagtgagcaccaagctcattcagcccattttacagacaaggagactgacattcagagtggagaagtgagcaccaagctcattcagcccattttacagacaaggagactgacattcagagtggagaagtgagcaccaagctcattcagcccattttacagacaaggagactgacattcagagtggagaagtgagtgctcagcccactcaggtctccagggccagagcagccagaatgggtgccaaaaaagaaaaaagaaaaattgaataagacctactatttgatagcacaatagggtgactatagccaacaataacttaattgtacattttaaaataacttaaagagtgtcattggattgtttgtcactcaaaagataaatgcttgaggggatggataccccactctccatggcgtgtgtatttcctattgcatgcctgtatcaaacatctcatgtaccccacaaatatgcacaccaaccacgtacccagaaaaattaaaaatataaataaggccaggcatggtggctcacgcctgtaatcccaacactttgggaggcagaggcaggcggatcatttgaggtcaggagttcaagatcagcctggacaacatagcgaaacctcatctctactaaaaacacaaaaaattagctgggtgtggtggcatgcacctgtagtttcagctactcgggaggatgaggcacgagaatcgctggaacctaggaggcagaggctgcagtgagctgagatcatgccactgccctccagcctgggagacagagtgagaaaaaataaaaaataaaaataaacttaaaaataaaagaaaataaaccctccaagaattctgagctccgcctactacgccatgtcctccctggaaggaagaggcaagattttccctttccaagccctgaaacagctgcactgaccactcccattccagggaccagggtctgagacatctgggtggctgtctgccaggcagaccccgtaaaatgggacagcccaccctgctcctgccacgtcaggccactgggatgggaagctctaaacagcccccgcccccccaggctgcagctcgaggaggagcgaagcctctttccttgcactaatttgcagtgcagtgtgctgtctgcctcgtgggcacatggaacgtatataaattaccccgccaggacgattaactgtttgtccaggctaattgtcagtattaaatctcgctcagtcacagttttaaagcttaatttaaattctctatctttaagaaatccatactccctcccaccacgggagaaaaaatagatttaatgggtttagtccatttccgtttgtagcaacccaagttataattaggcatgtgcaaagcggatgtttcggcgggcggtgagcctgcagacctgctcctctccttcccggcagggccggtcctggtggggagtgcccttgtctttgctgccctagataaatttctgaattaggagttattgctcagagacccctgagcctccatggcagcccctcccgattatggcattaatcttgtcaatgtgcttaaaggtggagaaagaattcatcctcaaaggtggaaggcacaagaaagcagccaggaaacccctctgcccaggagccaagagctcgggggagccatgggatgcaggcggatgggggggcttcccctcatgtcttcctgagaccactgccccgccagatgcccccttgccctgaaggctgatgctgccactgcagcttatcaggagtgaggacccctccttcctctcctctttctttctgttcccagatacccgcttagaagcaggttggagccaggaaaatgcagacaactaaggcatagatgtagaggatgcaaactgaacaaagctactgaaagcccccacactcatcccccttaatgtcctagggggaactgagactcagagagaggcgtgacttgcccaagggcacacagctggcctgggttgcagctgaatcccaggggacttggcacccattgccttgctacacattcatgaccagggtgaggtgcaattccttgttcaagggacacgcttggaagaggaatcttcatcgcccttcctaattctatgcatcatcaacaccagggcacgtatgtttacgctcattgtccctcactgggcttgccccatgcagagggtggcctgggggagcagagatggcagggagggcagctggaagtccaggtcagagagaggagagtgtgaccagggtggcagcaggaggcatggaaaagacggatgcatggagaggggtgaagagcgtgggaaccagggctggggctgcccagacctgggcactggggagggcaagggaagcgtcagtgacaactccagggtctgaacctgcggggtgaggaagcaggtggtagcagtgactgcccgggagtctgaggagggggctggttaagtggggaaggtgagcgtgatgccaggtgtgctggctgcaggggacagaaggtgtgcagggctctccccggggcccctaggctcctgaaaggcggtgccctaagcatcggctccatctcgttgtccctacccccgtccctacccccgtcacagtggccggcaagggcccaacacttagcaattgtcaaagaatcggcagacgtgtccagtgggagctgaggcagggacagggacatcaggcccacgtgttgaaggcgtgggcctcccacaccactgccctcagtgttgtgtaactcaaaaacccatgtgtaacttttgactctcctaaaacttaactacgaatagcctgctgttgaccagaagccttactgagaacagtcaatgaacacatattttgtatgtcattatgtgtattttattttgtaagttatatgttactgcattcttatgataaagtaagctggagaaaagaaaatgttataaagaagatgataagggacagaaaacatatttactcattaggtggaagcggatcatcataaaggtcttcacccttcttgtctttacattgaggaggctgaagaggaggatgaggaggggtaggtcttgctgtctcgcaggtggcagagatggaaggaaatctgtgcataagtggaccatgcagttcaaacccatgttgttcaagggtcacctggagttgaggaaggtgccgtctttctcccaaggcccagggttttctttgcagagagcctcgtgatttagccctctggagaggagggaagcgaggccaagcttagcagtgtgtcatggatgtgttgtttgggccccagggcatgagtcacctgccctagttttttttttttttttttttttttttttttttttgtaaaggtcctgctgttgggtggattcatattttcggtatcagcctgggagatcctgagtgcaggatgtggttctgcccctctggtccctgttctgttgtgtgcatttgtgtacacgtgcacccacctccccttcttcaaggtgcttgcccttccgccacccgatgcccaacagggacccaacttaagacacacacaattatttctgcaggtcccttgagctcaaagtcacccgaatgtgagctggagtgaatgcaaccaagcagtcccagcaacacagactgccctgctggatgccagcatgactgggaatttcactcccccactgacgggggagcctgggggtgttcatgtgtgttttcctcggtggtgtgaagaaagtcatttggtcctgtaacggctgccctgtcacggtgggaagttagaaaacaaacttggcaatcacacccaccttgacttcccaaccctgcgagagagcttcacagcaggaccaggagaacagttcttgggacctttctctttccacctgtttcatctcacactgctgcccctgcttctgtgacctgcagcagtctgcagggtttgaacccttgatctgccagaagcccaccccagggctgggaccaacttgctctgctgccagtcccaccccccctggcacagggacacatggatggggacgtagatgggtgctgactggtcatgaatgacctccagaacaggaacagaggagggtttttcagtggggcggccccaaggtgccagcgcggggaaaagtggctgcccggccattaggtagatgtattatttgtcctcaaaggtctgcgcaggatcctgggccaactggggcagctctcaggctgggctttgccagatcggagagcaaggcccccaggctgctcccacatggaatgcacgctaaggcatcctccctcctccgctctgtagcctttcacagaaaaacaaaaaatcaaacctgttctcgtctctatcaaagctcacgttgaagatgacagtgtttctcatttcctcgactctctctgaaaatatgtgaaattaggggaaatgaagagaagaaattgaaataacaagtgaggctggagaagaaccagcctcagaaacagaggtgcctggagaaggaggagggtgggttgtgggaggaggaggagaggaaactcagggctggcgatttcggatgaggcaggtgctggctctcaggagggagagaagcctgcggtggagacagcatcctcgtctgccccctgggaagcgagggaaggaccttggccgagggggacctaggagcatgaagagcaggagaaagcaggggggtgcctgatatggtttggctctgtgttcccactcaaatctcatcttgaattgtaatcccctcatgtcaggggagggacctggagggaggtgactagatcatgggggtggatttccttcatgctgttctcgtgaaagtgagggagttctcacgagatctgacggtttaaagtatgacacttcccgcctcactctcaatctctcctgctgccatataagacatgctttgctccccctttgcctccatcatgactgtaagtttcctgaggtctccccattcatgcagaactgtgagtccattaaacctgttttctttataaattaccctatctcaggtagttctttctagcagtgtgagaacgggctcatacagtgccaccatcctatccagcatcccctttcttccctggctcttgtagctgccctgtgggtgctccccactcaccttcttcccagaggagccctctagggaggggtgcagtctgcagagcctcgacaccccacccagctcccagcccacgcagaagcttgggaacaccagagatggccactcttgccccaggaggatcccccacccctcaggcagtctctgctctgggctcccacctgccgactggggctttctgtgaggctcttcctcccaggcctccttccctccccactccctgcacaggctggtcctgcatcatggaaggaaactcttcctgctctctttcctttctccttcacagacatttccctgcaacaagtctcatggacatccaattcattcctggcacctgcttctcagaggacccaaacccacaaccccttgtggctcagagcaagtggctcctatgggcctccccgccctgactcccttccactcccagcaaagggccttgctctcatcaagcagcccagcttgcagcccacctgagagcagcttagcccctatcaggctcccaggggccctgccagggtgggataaggcaggtggggcaggagggcttttaaggcagggacagatgtgacccctgcctcctactctggcttcaacaggtcaaaggtgcacacatggggaggaaaagcccttttctgcacctgagggcacctcccgggtcctgggctgccagctccatcttctgcgcaccaggagtgaggagcatcaaccacaccgggccccaggaggtggctgcctggccaccatcaccctcccactgaggggcccaggggagagaagactgtaactgctctggaagcttccggcctttcttcggcaacgaatctggggtgtggctggacctggaccctttcatgcctgggatcttaacattcaccatctgggtggattctccttcctggtctctctgtggatggatcttgtcagtctcctggaggaagggaagatgatgctccactttccccgggatgctgggacacagatccacaaaccgggccacttaaagtgacagacatttttcctctcccagttctggaagcagaggggagaaatcaaggtgtcggcagggctggttcccactgaggctctgagggagaacctatcccaggcccctctcccggatctggggctcccggggatccttggcgtccttcgcatggctccaatctgctgctgcttcacctggatttgcccgtgtgtctctgggtcttcattcctgtttcttgccaggacgctctcattggatttagggcccaccctaacccaggatgacctcatctccatccttaccttaatcacacctgcaaagaccctatttccaacaaggctgcattctcaggttctgggaggacatgaattcacaggttcacgattcagcccagtacaggatgacctggagtagagccaggatcccggaagtccccgggggctgatggggcccagcagggaagcagggatgggcagggtctccagggcacagaggaggggtgttgtgcacctgcccccttcctgggctcccctagtgcagctctttctggggccttctaccctctccatttacccactcgcccctgcagatggggggcgcatgatggcaccttttgatttaaccaagttattatgagtaagtgattcgggagctcttcttcaggcaggtgatcggggatgagcaggcagctgagaacaaaagagatgccgccaccgtgggagacgcctgggttggcggagcggtggggggaagggcgaggaggggaggattgcgggggttcttctgccacagtcaggcagggggaggcgccgccttgcccttcccttcccttcccttcccttcccttcccttcccttcccttcccttcccttcccttcaccgggaagcagcggccgcgatttaatatgcaaaggtggaaagtctggcattgggtgcatcgccccgcatgccgtatttcaaacaaagaatacacaacaaagggccggccggcgcggggatttgtcagaattcggcggtgggagagatttatctaagctgagtggaggggcctgtgaccttgggtttgagagctttaaaaggaacaggcggctgttgaagacgaacaaagagatgcttgtgattatcattatttaatataatggccttaaactgttaggagggggaattaagtggcacaagagaattgttttttattccaggagatgtaagaaagatgtaatggacaggaaaaagcaggggggaggcggagggagggagaggctggagagatttctgagatgaagtaggagagtgagcgagcctgcagaggcagcaggcggtaaacaagaaacgctcccctcccctctcccttctcctcctccttcccctcttctcccctcccctccagtcccctcccttcctggcaggttcaacctcagccccaaagacaagacagtagctgggaaggaggtgaccagccttgcgccaggaaggggttgggcagaaagagtccaagaaaggaggacggggcctggagcagtgtcaaagccgggatcaggatgcggcagggctagcagcttccccaggctggggggccagggctgccaggagacctgggcatcctgttcagagaaagcctggcacgggggacgggtgggtgtgtgctgccccggggcagtgagggtctgggaaatggaggctggtaaggtcctttcactggcgtccccaagaaggtggactgtgagccctcctgccagggttggatgctgaaagtgccaatgctctgagctgctgcagacggggggacagtgggggcgggaggagatggctggcctggcagctttgctgcagggttgacctaggatgtctcccacctgggttgaggcttgtccaggtgcctaccgcttcccagagcctgagcagagatacagctgaagcccaggagcctcctctctttcatggggcctggctttctcttttcatttgtaattttgtaatctttttcttaaagagccccctcccaaatctgctgagcgtcacctcccactaaagcaagaccaactaggtcttcacaacccgtcatggggagcaactgcagttctccccggaatgtgtggaagcctagttcccaggcagctgggggaggagggcacccagtagagcttcagagccaggcaggagtgggaggtggggtgggcagcaggagccggctttgtcctggcagcagggatgccaggtggacacccaggtggcccaggagggccccacacttcctgccctggggtggtcagccatcggggtgtgttcccgcagaaaggggagcggctccagccacaggtggactcacgtctgagatctgataaactagaagaggaaggtaaaacaggagtcaaactggagaggatgaggccacgcaggaaggagagggtgtgagctcccggagcccggtgcccagaaaccttgctctctggctgatctcaggaggcagcagagactcagaggcccacagttagggggcaggaggaggccgtgtggacccagcccaagcagctgggtgccagctgtggggcattcactggctgaaagctccaggagacccagacacaggcagcatgggtgcatggggtgacgcagatcaccctgcgtgagggacaccccatgcttttggtgggtgacagcctcagccacagttaggacacctgggccatctctgccacccacttgaggcttggccctgggcctcagtctcgccttctgtaaattgagggcaaggagaggacccaccgtgggctgactgagggtgggatgaggtgtgtgtgtgagagagagggctctgggggatacagaggggtcttctcactccatcctgtcactgcctccatcacccacaagagcagccccctctgtcaacctggaaggaagcctggctgggggagtcagggggaggggtctttaaccacaggggatgcctgcctttgctttttcctacatcactaataacctctccaaggctcaggttcaaagccatcaagcactggctgggaaatggctgggttgttgaggacctggtcaactgtcaagattttttcagttggcaaaactgatggttcagccagaaataagcactcgcatctctctgatcccgtctctctgtccctctcctcctctgtgtgcccagggcatgctcctaaggctgctagtgaggttgtgacctcagtagtatttggtattttggctgctctcttggtaatggcctggtccctggcacagccattccctccaaatgcgaactgctccctggaccatgaagcagccatgagatctcctgcttgtggaacatggaacattgagcatgtctgcaactctctcctcctactggaaaatccttcttcccatctaacctagatcctttgtgctgtggcttaaactttgcttttaatattcattcacttctctatttaatggactctgatagaaggagtttatcaaactcttaattctgtctctgaagcctttgttctctctctgctgcaggggaacctcagcccatcagggctggtgcccaggcaccctaggtgaagccctcagctcggccgccaccctggccttggcaggatccaggctctgaggtcctcttctggaggctgggtcctctctcatttcactccacgtcattattaagagatgatgcaggtcttggagcaagaaccctttggctctggaaaaattatgtgtgacactttacatatggatcaggtaattaatggacgcccggatttcctccgccataacataaagagcgtgaagacggcgctttaattccagataattaaagagcgatcagttcgcgagtgctgctcggggagtgctggctgctgtcattaacaccaccgagcccgctccattctccacacctcactgcaaaccgcggggcctcctgctccccgggggatactgagccacagagcccactgcactgctgtgtaattgaagtggccacatctgctgcaccgagcttatggaatgggagtaggtgtgtgcacacatgcatgtgcatgtgttgggtgaggagccgcagcatggccagtctagagtggccacacacgaccttagtgacctggccctagggaatgtgcagagctcaggtggctgtcactgccaccagggaaaacacgggtctcactgtacagagcatccttaatgagggcatagcatccccacttcagccccaagaaactgttcctcatcctaccaggtcacaggaaactcccaggacatgcaaggggctgtgccttccccagagctgagtgtccctgggtttgaaaagtgacaataattggccgggcacagtggctcacgcctgtaatcccagcactttgggaggccgaggcgggcaaatcacttgaggtcaggagttcaagaccagactgaccaacatggtgaaaccccgactctactaaaaatacaaaaattagctgggtgtagtggcatgtacctgtaatcccagctactcaggaggctgaggcatgataattgcttgaacctgggaagcggaggctgcagtgagctgatatggcaccactgcactccagcctgggcgacagagcaagactttgtctcaaaaaaaaaaaaaaaaaaaggaaagcaaccataattagtactcttcaagatgaagataatcacattccagaggatcatcttctcctgctgaagtccaaggtcacgggcagctgctcctcctgggagaagagcaggggtggacggacatcccactgcaaaggcagagcccagagtcctcagtggcctccctgggagagtgaagtagcggctaattacggccgagggcactgacaggtcttcctggttcacacagcacatctgtcacatttcctgataaatatcagccccttgcactgtcagacagagcctctgagggtgtccacgcttctttgcctggctctgctcactcctggttagtggcttccagaaaatcacttgtgctgattcccacaaatatttacagagtgtctgtgaggggccgggcaggcactgggctggtctcaggacctggaggtgaatgagaagaggctgctgtacagaagaagcatgtgggcacccaggagaagggatggaaagaaacccaggctgcacaacagcgggggtgcaggcatgacccggagctggggacggctggggctggggaggcagggaggccgggcctgtcagaggacttatccttgcctaccaggcaggggaggtcaggaacaagagggagctcgtgcaggggcgtgcacagcaggcatggttttgcatgcacctggatctgtgggtacacaggccagcatatgccatggtggctttgctgattgataccttctgtcttcctcatccatctgtcctctgcctcacgtggctgtggtcatcctcccttcaggcacttagccacttctgctgggaaaagatctgtaagaagtctccagggatggctggctggctggcaatcgttgccttcttttctctatggttttaggacagagtgaagttttttcctaaaactcccctttctctaagcctgggtccggggtcaggggggtggccacttaagttgcatttttatttcaacctagacctctttctctcaaaccctagactctgacatccaattacctgctcaacatgtccacatggatggaatctcaaatataaagtcaaaactaaatgcctcttcttcatctcctaatctgttcccttcttggctaatagcacctccacccttgcagtgccaagacaaagagcttggggtcatctttcactcctcgccttcctgattggccaggaaatccttgtggctggaccttcaaattaaattcagaagccaacattagtggagaaactggggaaattctaataaaagtttagcgaatgggattgcgccagtgataattcctcagttttgctaagtgtgtggtggctgtgtgagataacagggaaagccaggggaacacagtgaaggcaacattctggaatatctttgcaactcttctattaatctaaaattatttccaaataaaaagttcgatagatacataaatacgagcattcgtttgttagggctgctgtaacaaagcatcacaaactgggtggctgaaagcaacagaaatgtattctcacccagggctggaggccacgtcggaaatcaaggtgtctgcagggcaggttcctcttgagggctgtgagggaggagctgctccaggtctccctccttggcatgtggatggcatcttctctctgtgtctctttcaaataacactgtaacacttcacaggtagtgtgagcaccttaacataacaaaaccatcctcattcctccctttcatacctcgtatcattgtgtaacagtgaaacagcaagaaactaacgtcactcacttcatttttctttaaggggcttttaccccttcctgcacgtaggctaggataattttagagaactgggatgaaatgcgaaacagcaatcatgtagtttttgaaactaactctgggagtaaagggtgtattagtccgttctcacattagtataaagaactgcccgagactgggtaatttacaaaggaaagaagtttaaatgactcacagttctgcatggctggggaggcctcaggagacttacaatcactgcagaaggggaagcaaacacgtccttcctcacatgatggcaggaaggagaagggctgagcaaaagcgggaacagccccttataaaaccttcagatctcatgagaactcactcactgtcacaagaacagcatgtggaaaccacccccatgattcagttacctcccaccaagcccctcccaccacacgtggggattatgggaactagtattcaagatgagatttgggtggggacacagccaaaccatatcaaaggggaagtttgtaaacaactaagtctgttttgttggagatttacagaagcattgtgacctaaccaaggacagaaaagttcccaacctcctcgacccctcactggcacccaaatgtttgtggtcctcggtcacctcttgatcccaaccactgcacgtagcctccccatatcccctcacccataaaaaccctctggccagcctgaaaaactgaaaatggtactttagaatgctagtttgccatcctcttggtttgactgactttccaaataaacctgcttttcttcctaccaacccttgtctctagtggctggctttcaggcagcaaacagtcaaacctggattccattacaattgctgcaattcagttcacttatagatcagcatacataagcacaatatatatataagacactacataagcttatgtaactgaatacatcattgctattattatgttgaaccaactgctgtctgtcaggtcaatcaagaataagaaaaataaaagtttttattttaccttcacttttcctttctttaatgcacttcctttctttatgcagatctgagtttcttacctatattgttttctctaaagaaattttctttttaacattttttgccagccaagtctactggcaacaaattccctcaattctgagaatgtttttttttctctttcactttttcatcttatctatttttttttttactggggtaaaatatatgtaacataaaatttaacatcttagttatttttaattgtacagttcagtagcattaaatatattcataatgttgtataaccatcaccaccatccatctctataccactttcatcttatgaaactggaactctatcctcattaaacactgacttcccattcccctctcccaggccctggtgaccactattctactttgtttctatgagtctgactgctataggtacctcatatcagtggactcttacaatagtcgtccttttgtgcctggcttatttcactcagcatcatgtcctcaaggttcatctgtgttttagcatgtgtcaggctttccttttttaaggctgaatcataatcgactgtaatgtatacaccatattttgcttatccgttcatctgttgatggacactttggttgtttccacctcttaactattgtgaataatgcttctagaaacatgggtgtacaaatacctcttcaaaaccctgctttcagttctttagagtgtatacctagaagtggaattgctggatcatatggtagttctgatgtaggagaggcacaccccaaaattggggcttagcccaggagggtccttggcttcatccaggaaataattcaaggggaagccagcagtgttagacagcaatcttttattgaaacagagctgctccttgcagaacagggctaactcataggcagtgcacctagagtcagcaacgtatgggctgttggcaactctatttatactcatgtaaacccactttcaattacatgcaaattaaggggtgggttaatgctaagggttctaatggataaagtagtcagcatgcaagaataggtgggcaatgtaaccagagacagaaaccctgagaaaaaccaaaaaggaaatgcaggcaaacaacagcactaacaaaaatgaagactgactttgttgggcttatcagttagcttggatagggctgaacaaagaatctctgaactggaggctatatcaatagaaacctccagaactaaaaaagaaagagaacaaagactcaggaaaacacaatagaatatccaagaactgtggaacaactataaaaggtataacatacgcacaatgggagtactgctatgggagtcccaggaaactaatacaatctgctgagaggccgaacaatgctgtatactatagtattggtcaccatttgttgactgtgtgtgtactttaacctaccaaggaagagggtattgctgtgctcatttcacagatgaggatgctgagacccatggtggttatgcatccttgccaagcccctgttccaggaagagaaattccagatctaactgacctgagcctgtgtgcagctgctgtgctctgctacccacatctgtaggctctgatgagccatgagatgttcactctagctttgctgaagccccatgtccagactggccatgtggagacccacagcactggggatatatctctggtttcaggtccaggaacccggttctgcagcccaacctcaatgtcatgggctgccttgacaaatgctgtgcctgctgacctggcctggggctcccaacagctgcaggggggccttccactgcctccctgtcctctgtgccatttccccacctggccccaaactgcttgaaaccatcactcgactaccagcctcttcccactactgtcagggacatatttgctgctgtcagtggctgcattgcacagaagcgaagagaaaaatggtttcagactctgaagccactactggaggcggaggtgttcggattaactctgcagtcctttggaacagctgtttcctggctgttccactctaacatgtgaatgctctcaaggctattcacaatattacttccaccttcctagagaaagatgctgcagaaataagccaggcaaattgtctctgtgcgatgacatacacagtaggtgcttaagaaatgttggctggattgatctgaaaataagcatgcacaaacagcagccatgcgctattcccttccatctgctggaaggctggcattgaaaccttcctcctcctggtagtcttttgccagagaaccaggcatgcttgcccagagagctgcctcttgagggtagggccctggaggctcctgctacaaagcaatctcagaaggcttatcacagagtgtcaggtgaaaagggcaagatacagctgcacttgcagcatcatctcagccgtgtgaaaaatatgtgcatagaaaatgcctggaagggatgcaaagaagaaagagtttatataagtagatccacaaatgcaggtggatgcattttttttttctggaaagaatcacagaaactgttaagttaatttgggggaaagagctaggttgatgggaaggtgactttcacagtggcccccttttgtggtctgttttctaactttatgtgtgtgtgacttttattcatacttcaaatgttagcagggttattgggtagcacaattttggtccttttgtttgctttctttatctgtacctctccagagtaaaaagcatttttagtaatcaattaatttttattcatgtcgtcaaacaaatgaaatagaaaattcaacatgcaaaaaaaaaaaaaaaagactgaaaacaatatggcaggattttaataatggtaatctccagttaggtagattattggattaagattttttttaattttattattattatactttaagttttagggtacatgtgcacaacgtgcaggtttgttacatatgtatacatgtgccatgttggtgtgctgtacccattaactcgtcatttagcattaggtatatctcctaatgctatccctccccccgccccccaccccacaacagtccccagagtgtgatgttccccttcctgtgtccatgtgttctcattgttcaattcccacctatgagtgagaacatgcggtatttgggtttttgtccttgtggtagtttcagcaaactgtcgcaagattttatttcttcatgtttgatctctcttgcagcccagacaagtaattgtaaagggaaaataaaatacccagacaacagcagggaaaaccatgaattggtgactttatttgaggagagggcacccaactgtcccctccccaacccatcatgcttgctctgtccttagttgcaaattccctttgggatctggattcctaattcatgaaccctcccttttgcatggatcagggctaatgtgctgtgtcagtaatagtttttgttgcctgagaaaacacaaattcaaagaaaaatcttaatagtgaattgtggcccctgggggaagacactgaacagacaatcaggaccaatatggttaagaccactgctttgggttggctgtgtccccacccaaatctcatcttgaattatagttgccataatccctatgtgtcgtggaggaaccaggtggagataattgactcatgggggcagtttccctcttcctgttctcatgatagtgagttcttgcaagatgtgatggttatatatggggtttcccccttcactcagcccttgttcttcttctcttccaccatgattgtaagtttcctgaggcctctcccgccatgctgaactgtgagtcaattaaacttctttccttcataaattacccagtctcaggtatgtccttagatcagcaagagaatgggccactacaaccacagactctgcaagcaaactccctggagtccccgtccattggtttactagctgtgtgactttgggcaaatgacttaactcctctgtgcttcatgtcctcatctgtaaaatgggtatagtcagtgttcctaacagatagggtcatttgtgaggcttctaagaaggacaatgggtggtacatatgaagtgcctaccaaaggatggctgtgattcttcttgcagggtggacgcctttcccggcagttcgtctcagcaccacagcctgggtgcctgcatcgcctgcaccatgcatacagaagctaacaccaggctgtatcaattccggggcccaagagagaaacaggatgtcccatgtgacttctgctactttggagtggggtcttccaggaatctttgtgatatggcttggttatgtccccacccaaatctcatcttgaattgtaattctcacaattcccacgtgtcatgggaggatcccagtgggaggtgattgaattaaggagagggggagtctttcctgcactgttctcgtgatagtgaatgagtcttgcaagaaccgatggttttacaaatgggagtttccctgcacacgctctttttgcctgctgccatccacataagatgtgacttgctcctccttgccttccatcacgattgtgaggcctccctagccatgtggaactgtaggtccaataaacctttttcttttgtaaattgcccagtctcgggtgtgtctttttcagcagtgtgaaaacggactaatacactttgggtaataggaagagctgagggatgttaagtacatttcctccagcccagaggtgaggggcaggtggagtcggggagaggcaactgccacaggctggacatctgtatccaggctggcccaagtgggctctgacaaggctaaggatggcaagtgggcaagcacagaggaggggccgggaaactggccctcacccggccctgatgggaggggaggaagagggtggttggctctggagtgagggggcccttgtgttagctctgacaggaactctctgcaggctttgcagaatggcaaattttgagttgggagaattcaaaataataggaactttcaaaacccattcctgcttagccctttcctggtgcagcaaagatcctgtggatcagggagcactgcggatgttcatttaacatcatagagacagaaggaagcctaaccgtgagcttccaggatggtgtctgtggccccagcgtaagtggaggatgccgggagcaagtgcaacacacaggtttctgacctgagacgcccaggggtgtgcagaggtggtggtgggcatatcagttataaataggcactggtataagtttccctttcctgtcacaatcacataccacagtcagagtggctcagaaaacaaatgaatttgctcacagctctggaggctgaagtccaagatctaggcatcagcagggttggtttcttccgaggcccctttccttggcttgtagacatctgatttctccatgtcttcacattatcttccctctgtgtgtgtctgcccagatctcctctccttataaggacatctgtcatcttggattaagggccaccctaatgaccttgttttaacttaattacctctctaaagaccctgctttcaaatgcagccacactccggaggtactgagggttagggtttcaacatatgaattttaggaagaacacaatttagtccacaacagcatgtatataatattaagggttttttgtttgtttctttcttgtttttcagacagagtcttgttctatcactcaggctggagtgcagtggtgcaatctcagctcactgcaacctccacctcccaggttcacgtgattctcctgcctcagcctcctgagtagctgggattacaggcacccgccaccatgcccggctaatttttgtatttttagtagagatggggtttcaccatgttggccaggctggtctcgaactcctgacctcaggtgatctgcccgcctccgcctctccaagtgctgggattacaggtgtgagccactgtgcccagctggtattttttttaaaccaaaaattacctttgatatgtctgcacacatagaataagctgtctgtttgctttgctttgtccgggtgcagttgtcctctgatgactcaagtgccagtgacatccactctgtcctgggacttgctaccatccaagttctgtcccgggtgtgtggatgagtccccagcatgatccatgccttcaaggagctcagggggatgaggggcaggggacacaggagtgtggacagcagccgccgtgatcccacactgcttcccatccagagaggaagaagtgatgaactggtgttgggaaaatggagctgaagctgatgaccggggagcaggtggagtttggaaaagtggcctagggttcctccagcttcagaggcagaagagctttcctggaagaggagccactctcggccaaggcaggaaaatgtgaagaaaacgcagcacgttggttggatctcattttgtctgacgaatgtcagggccctgtgggagatgaggagggaggggacacagagcacccgagggaagggtcctgccatccaggctgcaattagtttaccctgcgcaggtgcggagctggtgaaggatgtcagtcgggagcaacacaatcagactccattttcttaggataactctgatataaaaatgcataactaattgctaataaataatttatcaacattattcaaagcttggagtctgggtgggggctgggtataagtcataggctcattgactgtgaagcgaggagaccctccccagcaggggtttctgtctgctgagccatctcatcaccacgtgctctgaaatggatgtctccttctctgaacttcagcgtccttaactgaggaaagggcctgaaagttgatcaataccatccatgccagccctaaaactgttagcttagcataagaaacggtacacacatcaagggattccaaggagcagcaggagagaggagagctcagagaagcaacactgtatttacttttaaatacaggtttcagccaggtgcagcggctcatgcctgtgataccagcactttgggaggccaagttggaagcatcacttgagctcaggaatttgagaccagtctgggcaatgtggtgagaactccatccctacaaaaaaatacaaaaattagccattcagtcctggtggcatgatcctgtagtcccagctactcaggaggctgagacgggaggatccctttagcccaggagttccaggttgcagtgagctatgattgcgccactgcactcagcctgagcaacagagtaagactctgtttcaatgaatcaatcaatcatcaacaggtttccatgttaatcctcaccacagtcctgatcataagatgttatgatctcattttacagatggggcaacagagagtgaggttaggggacttgcccagggttacacagttagcaagctgcagaagtgggattcgaacctgggtcctcccatcaacccatgctctatccctactgagttaacaagccacatctctggctagtccctgaccagtcctagccctctcccatctctgccccctctttgcatccagctgtcccttgagcactgagtcccagtcacgctaaaataactgacaccttttcctctctctcaggtacagttgagtctgggttgttattgctatggattctcagggacacaggggttaactccactggaaatcatatgagtaaggtggcaacagagtaaagctcacagtgatgaacagataatgacctgatgaaaaatcgcctcattgcagatcattagctatcttccctcaataatgcggttgagccgaaggccacagtaggttttcctctgttgtttgtttattggaatctgtctccaaaaagtataaaagtgtggtgggctcctcacactggctggagagtgcccagctgctcaaggtgaatatttgtgttggggggaatatcatcctggtattgaaaaacaggacagagctctccagaaggatctggacactgatttttagttactagctaagtgtttgggaaatccacttgtcgtaggtggggtattctgagaagcagattctgagacagagctctgtgtgcagagaggattcgcgtctatgggggcaaaggatcagcatcaggcagagagagaaactgaactctgctgaggtcgcaacaaagacctcagtggatcccacggaagcgctggagccaggatcacttttgtaggggcctgactggtgaattaaggggcagaggcatatggactgcatgtgtccctccaaaatttatatattgaagccctaaccctcagtgcgattgtacttggagatagggcctttacagaatgaattaaggtgaaatgaggctgtaaatgtggagctctgatcctattgcactgtggccttacaagaggaggagacaccagagcttgctcgtgtgcttttgctctgccctcgacaccctgtctccctgagcatccacagataaaaagccacgtgaggacacagtgaaaagacggctgtccgaagccaggacgacagccctcacagggtaccaactctgccaataccttgatcttggacttctagcccctagaactctaggaacataaatttcctgttgcttaagccccctattctgtggttggttctttgttatggacattctttgttaatataggggacatatgaccacctctgctcccatttcctcaggatggaatattggttttgatttttcttcttttttagttaactttgttgaaacagaatttgcatacaataaatttcgcccattttagtgtgcatttgatgagttttgacaaatgtaagcagtagtgtaatcaccatcataatcatactatagaacattcccattaccttgaaaagttttctcctgcccttatatactcaattctctctccctcatcccccgacctctgccatctgggctcccgccgatctgctttctctcactatagttttgccttttccggaattttatataaatggaatcatgtaatatggagtcttctgtatctatctttttttacctcccacaatgctttggagattcaaccatgtcattgcctgtgtcagtaggtcattccttttaattgatgagtagcacagcattatatggatatgccaaatatttattcattgatggacatttgggtttgctctgatttgaatgtgtccccaaatttcatgtgttggaaacttaatccccaaattgatatgctgatggcttttggaggtggggcctttgggaggtcatcaggattaggtaaggtcctcagggtggagccctcatgatgagactggtggctttataaaaaaaaaaaaaagaaaagagatgggagttggcaccctcttgccctctcatcacatgatgccctgtgccacatgatgccacagcaagaatgcccttaccagatgctggcgccatattcttggacttgtcaggttccacaactgtaagaaataaatttcttttgttttataaattacctagtctcaggtattcaattgtagcaacagaaaatggactaagacatggttgttttcagtctgcgggttttatgaataaagctgccatgaatatgcaacatacaagtctttgtatggatctatgtttcatttctcttggctaaatacctaggggtgggattgctgggtcatataagtgtagtttagctatattagaaactgcccaactgtttcccaaaatggccatgccttttcagatttccaccaactatgtatagagttccagttgctccttgtcttcaccaacacttggcattgccagcctttttgatgctaaccattctagcaggagtgtaatgatttctcattgtggttttaatttgcatttcattaattattgatgacatcatgcatgtcttcaagtgcttatttgccatgtatatatattctgtgatgaagcattccaaatagttcaccctttcaaaaaatccaaatttttcacccatttaaaaaaattgaattgtttatataattgagttctagatacaagtcctttatctctttatctaatacatgtatgcaagccttttcttttaatctaagcattgccttttcattttcttaacagtttattttgaagagcaaaagtttttaatttgataaaatccaatttgacaatcttttttatagtttctggctttttgtttacttgttttgttctaagaaacatttccctgacatcttccatattttcttctgaacatcttagagtttcagcatgtatattattgtctataatccattttaagttaattttgtatatgatgtttaaaaattgagatttttattttcccgtgtgaatatttaattttttcagcaccatttgttgataaggccatcctttctcctactgaattactggtactgttattaaaaaccaattggccatatatgtgtggactctgttacattgatctacatgtctatctctatgccaatatcacactgtcttcattactgtagctttataataagtcttaaaaccacatagtgtaagctttccaactttattctcttcaaaattatttcggctgttctaactgcttatcatttccatataaattttagaatcaacctgtcagtttctatttttaaaaaagcttgctgacattttgatgtgattacattgtatatataaatcaatttggggaggatgtggagttttacagtattgctgctttggattcattaacatggtctacttcatttatttaggtactttaaaatttttctcagaaggttttgtagttttcaatatataggtattgtaatattttgttaaattatacctaagtattttacttttagaagttcttataaacagtattgtttcttaatataaatatccagttttctgttgcaaatatgtagaaatacaattttttatattaacattgcatcctgtgaccttgctcacttattagttccagtagccttttttgtacatttcttaggattgtctacatagacaatcatatcttttgtgaaataaaattttcattttgtctttctaattgatatgccatttacatcttttaattatcttattgcccaggctatgacttccagcaaaatattaaataaaagataaaagtggatattcttgccttgttcctgatcatagagaggagcattcaaccttatgccattaagtatgatgtcagctgcaaattttttgtagatgccctttatcaagttgaggaaattctcttctattcctagttaactgaattggttttttttttgtaatcataaatcgttttgaattttgtccagtgttttctttactagatatagagatctttatatttacatattgctcttaagtgagctttggtaacttgtttcacttaaggaagtagtacatttcatccaagttgttaaattaagctttaaaggtctgtaggatctgtagtgatgcccctcttttattcttgatgctagtaacctgtgcttctctcatttcttctcttaattaatctggctataagttaatcaatttcattgatcttttctaggaatcagcttttggttttagtaatttctttgttatttgtttaagttttatttcattgatttttgctcttacccttactattgcctttcttctacttaccttgggtctaatttgctctttctgtagctttttaaggtgaaattttaggtcatcgatcttaggtttttcttcttttctaatataattatgtaatgcgtaaatttatcattaagcactcttcagctgcatctcacaaattttgatatattgcattttctttatttagcagttcaatgctttttctaatttttcttgtgacatatatgtaatctagaaatctaatttaagttttgtttaatttcaaattttggggatttccagatgtctttttgttattgattttttaaaatttaattttgttatcagaaagcatacttcatattacttcagttctattaaatttgttaaggtttgtattatggccaagaatatgatcaatcttggtaaatattacatatgcacttaaaagactatgtattctgttgctgttggttttacaaatatcaataaggtcaagttggttgctagtgtagtttaaatcaatacataattattttctatctacttgttccttcacatattgagagaagagtattgaaatctctgctataattatagatttgtatatttcttctctctattctatttgtttttgctttaaatatttaagattacattgttttcttgatgaatttacttctttataattatggaattctcccctttattcctagtagtatgtcttggtctgaagtctactttgacatgctgatatagccactctaattttcttttgattagtgtgtgtatgatatttctttttccattcttttactttttaacctttctatagctttcttattttggtaggcttcatgtagatagtcaatacttggatattactattttatccaatctgacaatacttgcattttaactgtaatgttagaatattaacatgtaatgcaataatttatacagatctaccatagtaatatttgttttctctttgttccatctggggtttttgccctttttctttcttttcttttcttttgaatttatagagcaatttttataattctgttttatatcctactactattgtattataagcttttgttcttattttttttagtggttttttttttttttttttttttggcggagtcttgctctgtctcccaggctggagcgcagtggtgcatctctgctcactgcaagctccgcctcccgggttcatgccgttctcctgcctcagcctcccacatagctgggactacaggtgcccgccaccacacctggctaattttttgtatttttttagtagagacggcgtttcacggtgttagtcaggatggtctcaatctcctgacctcgtgatctgcccgcctcggcctctcaaagtgctgggattacaggcgtgagccaccgcgacctgccttttagtggttgctccatagtttacaatgtacatcttaatttatcacgatctacttccaaagaatgttatagcatttcacgtatggtgtaaagaccttaaaacggtttattgtcatcccctaccttctattttttgtgctattgttgccatgtattttcttcatatacctctcaatgcataattatcatttttgcttttctagtcaattatcttttcatgagatttttttaaattaaaagatatcttttataccttcccacatatttaccatttctgatgctctttatttctttgtgtagagtcaagtattaattttctggctgaagaaatttctttaacagatcttgtggtgcatgcctaccagcaataaattctctcattttttttctttgtctaaaaaggtctgtatttcatctttttttgaaacttatttgatattttctgctggctatataattccaggtgacttttttttcttccagcactttaaatatgtcagtccattttctcctggctctcatggtttccaataagaagtcttctgatattcttattttcattcttgtctttgacattctgatgttagactacttgatattctcccacaggtcactgaaactcttccttcctttaagcatttgttttagtccatttgggctgctataacagaatatcacaaactggctaatttacaaaggacagatatttatttatccctgttctggaggtctggaagttcaagatcaagtcaccggcatttggtgtttgataagggctgcattctctggaaggcaggaatgttgcatcatcatatggcagaaaaccagaaaagaaagctaattgaacaccacatgaagcctcttttataagcaccttaatcccattcacaaggaagaagcctaattacctcttaaatgccccttgtcttgctcacattagcaacacctgaattttggaggaggtgcagtcaagccatagcagcattctttttttcttcctgagcttctctctttttttttttttttttttgagatggagtcttgctttgtctcccaggctggagtgcagtggtgaaatcttggctcactgcaacttccacctcccaggttcaagcgattctcctgtatcagcctcctgagtagctgggattacaggcatgcaccaccacgcccagctaatttgtgtgtgtgtgtgtgtgtgtgtgtgtgtgtgtgtgtgtttagtagagatggggttgcactatgttggtcagactggtcttgaactcctgacctcgtgatccaccttgtcttggcctcccagccgaacttccttttttggatagtttctattgctgtgtcttctggtgctctaatttttcttcttcatgtgcaatctgttttcaatcacacccaatttattgtgttgcagtgtgttttccatttctagcagttttatttgggtctttttaatagctctcatttttctcctgtgtgtgttttgctctccatgattttgctttccacagtttcagttacctgtggttaactgcagtctgaaaataggtgaatttagcacaataagatattttgagagacagagagaaaaagaccatgatcacataacttttattatagcttattgttatatgttctattttactattatttattattgttaatctgttactgagcctaatttatacattaaacagtattataggcatgtatgtataagaaaaaccaggtatatataaggttcaggactatttgcagtttcaggcatctactggggactttggaacatatgctccatggataagagaaccactgtatatagtgtgtggtgtgtgtgtgtgtgtgtgtgtgtgtgtgtgtgtgtgtgtgtgtgtggagagagaggtccttgtctattaattccatcattctaaaatttttagatatatttctatttattgatttttttttcctggtcgtgcctcttactttcctatttcttagcatgcctggtaattgttaaataaaatgttagacatggtgaattttacattgttgaacactagttttccttgcatccctttaaatgttttcggattttgttctagcatgcagttaagttcattgtttggtccttttgaggctcatttttaagctttgttcagggggatccagaatggcttttagactaacactaaattagccccgatacaaaggcaacattcttctgtggactccacttaatccccggcattatgaagtttcttcactttacctactgggaacatgagcaaagtcccagccttttgtgaggcccatgaaatgtttgggtacttcttcctctttgttctttccgcagctttgtggatttttacgacatgcacgtgtgggtgcacacacaaacacacacacacacactctctctcacaggtcagtactctgccactgagttgtggggaccactctgcagatttctgaatcaatctctgtctctctgagtttgtgtgtgtgtgcacgcatgcatgtgtctgtgtgtgtttgtgtgtgcatgtgtgtgtgtctgtgtgcacacatgcatgtgtttgtgtgttcacgcatgtgtgtgtctgtgtgtgtgcacatggatgtgtgtgtctctgtatgtgtgtgtgcacatgtgtgtgtgcacagtgtgtcagtgtgtgtgtgtgcacgcatgtgtgtgtctgtgtgtgcacatgcatgtgtgtatgtgtgtgtgcacacatgcgtgtgtggccgtgtgtgtttgtgtgtgtttgcatgcatgtgtgtgtctctgtgtgtttgtgggtgcacgtgtgtgtgtctgtgtgtatgcacgcatgcgtgtgtgtctgtgtgtgcacgcatgtgtgtctgtgtgtgcacgcatgcatgtgtgtctgtgtttgtgtgtgtgcatgtgtgtatgcctgcatgcgtgtgtgtatgtgtgtgtatgcatgtgtgtggttgtgtgtgcacacacgcatgcatgtgtgtgtgtgcgtgcacacatgtgtttgtgtgtggtgcgcgcaagcatgtgtgtgtctgtgtgtgtgtgcgcacgcatatgcgtgtgtctgtgtgtgtgcatgcgcatgcgtgtgtgtgtctgtgtgtgagtttgtgtgtgcgtgcacacatgccgctgcatctcttctggacctgccctgaaaattcctgctgcctcagtctccctgaacaggaatccctttttcttccatttagtggactattgagctctgttgggttctcctccctacccaggggcctggaatctgcctccaggaaataagctgggagaatcttgaggctcaccctatgtttttcttttcccttagagatcagggtcctgtgatacctgtgactcaatgtctggaagcaattattttatgtatatttttttttattgctatggcgggagggtcattctcctagcagttaattcttcatgggaaaactactggattcaccctctatcttggtcagaggtggggaggggtctagttcagaggcttctacttggtccatgcctctacaacagctctttccctacatgcctagaaacaacatggcacttctgcccactaccaagtatgtccaaccgtacatccagggaccagagagatgacctccggtggatccatggaacctagaacctaacttgagctggatctgaccaggactcccttgatgatatgaccccctcttttagtcagtttgggatgccctaacacaggggtgtctcattttgtggtttccctgggttacactggaagaaatgtcttgggccacacaaaatacactaacactactgatagctgatgagctaaaaaaaaaaaaaaaagaaatcaccaaaaaatctcataatgctttaagaaagcttaggaatttgtgttgggctgcattcaaagccatcctgggctgcatgcggcccatgggccacaggttggacaaacttgctctaacaaatatatcataggcataggctggtggcttagacacaagcatttgcttatcacagttccagaggctggaagtccaagatcagggtgccagcagatctggtgtctgatgagggcctctttcttgtttgcaggtggtcagtcatcttgttttgtcctcacgtggcagaaagagagaggaagcaacctctctcatgcctcttcttataagggcactaatccaagcaagacagctccacttccatgatctaatgacctcccagaggccctccttcgataccatcacactggggactaggctttgacatttggattttcggggacacaaatgttcagtccatagccctatgccattgctctaacagaagctatgataatgtattgtcgttattatgattattagttaattgaatgggcatttttgtgccaggcatcgagttttacctgaagattctctctttcattcctcaagatgctctcgaataggtaccgtcatattctatatcttgtaggtacagaagttgagacttataagaatgaagttaacctgcccaaggtcaaggatctgaactcaggctttctgattctaacttgaccattcacttcccagcatgacagcaactcacagttgtagagggcagaatagtgcagagagtgctgggaaatgctgcagaggggaatgggatgtggatcaaagggcaatgggggtgccctgtccagttcagtgcctttaggccactgcaaaggtagtggcttactccacaaagaattgggcctcaggcacctgctcaggacagacctgtgaagatcttccaagattttcaatggcatttaaaatattaaaactaatacatcggcttctgtttcaaggaacctcagtttgatgacccccagactaataaacctactcatcctggaaactggcataagatccagtgagactgtgtcctggaaagtagcacatgagccctgtgccaggtgctggggtgcaatggacgcaaaggtcatgtgcacccactgtgtccaggtctcaatgtagaatctagatccacacctggaggtacaggcttaactgatctgggcattgacccaggttggctaaaaacagcaaaaccagagagaaagactaaaacctggatagaaaatagatttaatttctcatgccagttctgaatgattgcccgaggcttcctggaatcttttattgagaaagactgggagggtgtggaagggtccagtaaaccagagtgcgatgatggattagtaatgtctgctatggtcagggaggtggagagtggctgcctgaagctcatgatttgctgatttgctgaccctggtctaagctactgtgcaggagaggggcagacagtcctagccagagcagtggtgcagactctcaaagctgagttataaggagaaccaggaaacggggcccgacacaagagggtttagaacgtgttggaaggaggatcagccagatgaaggcaagtggactgggacagtccccgaatggcaggtctttgcaggtctttcgtgaaccgctattttgaatgccaacttgtccccagttcctttgctccacgagtctccctagatctgccgtctcctaacacactgtacataacatttactatgtttttcatttcttctgtctccctgctgctggcacataaactctgaggatctctgttttgttcactgacatacaccaagcacctctagcagtgtctggcacttagtaggtatgcaagattctgagatgttgggggaacctccccctctcagccaaagctcctaagccttggctcccgcccgggtctggctgctgctcagaaactgtgattggcagatacatatgtctttgattaatacgaatggggaaacacattcacacttacttaatacattcagttttgttggcaatatatttcaaaatatggagcccttcgggggaggcagtgggggtgaggatgataatgaaggagtccttccctgggagtcctggctcaggaggaggggaagggccagccccaagctggaggcactggctaactgttctccaaggggggccctccctcctcacatcctggtctgtaacaccgggatgccagcatcagccctgtgtacctcacagaggtgtaaggtttcaaggagataatctgtgctaaaagatgcttcgtgacatggtacacctttgcactccttttgttactgttgttatgatgatgatgtttccttaagtggatgggcgtttctgtgccaggcattgtgtggggagttttacaggcattctctcttttgttcctcaaggccccatggaataggtaccgttatattctatatcttgtgggtacagaaattgagactcataagagtgaagttcacctgcccaaggtcgaggatctgaactcaggctttgtgattcacacttgactgagcaggacagaaagagatgcctggcatcttcctgctttgcaaaccaggaagagggtcctcaccagaccccagatactgactgtccccaactgcacatccagcctgttagccactaggaaaagaatgacatcaggggaaggctgaactgatgcgcatgggaaggcaaaccctcccgtcagtgaatcaggtcaccctgggcaaggcggatgacggtagtggaaatacagttggccctcgagcaccatacgggtttgcctggtgagagtccacataaatgcagattttttccaataaagcttacaccgagcgtggctgccttcccttccaccttctttgcctcttctacctccaccatccctaagacagcaagaccaccccctccttctcctccttctcagcctcttcaaggtgaagataacagggatgaagacctttatggtgatccccttctgctaaatgaatgctaaatatattttctctttcttaccgttttcttaataacatctccttctctttggctcgtttatgataagaatacagtatataacacatatgcaaaatatgtgttcatcaactatttatgttattggtaaggcctgcatcaataacaggctattagtagttacattgttgtgggcatcaaaaaaaaaaagacctggggacttcagcatcaccggcctgaattcaaatgccacgctgccactcaacggctctgtgccttcggccacgtggccaccgggttagttttgtctccttctctgttaggcgaaactgcaacagtagttgtgaggatgaaatgataaatgcagcccctagcccaggactaggctcccagcgggtgttccggaatcctagcttccatgtcccctcggcaaactcccatggaattcaggaaacactgttggctctctaaggagcatgtggcctgtcaccctgggtcccacctctattggccagcagccccatttcctgggactctaggtgctgttggaattttgcaagcgtaacgaccgaccacccctgtccccaaagggagtatggcagaggctggttggggggatttaatttggacatagctccgttccagtttgtcaaacatggcagctgctgcctttggcacgtgcggtcccagctgctggtcacttgccaaggaagcagtgccctgggcagaaggcagctttgtgctcctgtctccagagacagctgtgcggtgactgaacaaggggtttctttctccctttgggaaggtacgtaacagccccccaagaattcatgccctgtctttatcaacaagaggccttcctcagtgactggcgtgccactggctcagctctccagctctgatgttggccccggagcggctggtcttggcgtcactatctgggctctgtgagtcagttggtttgcaggctgctgaacacccttcagtgctggggagcccctatgccacctggagggggtgcccaggatgcctgggaagccagtgcatcccctgtgtgtgaacagccaggctggcaaatcggagactggggggcttgagccaccgcgcccagccagggtcatcgcagccacattgttgcagatctgggatctgagcccctgcagtgtgatcccaggcctgtgctttaatcacgacaccacccgcctccttgtcccacgcagttaggatacctgttcctcgtgagccaaacgttttcacagccactgtgccctctcctgcctcctttattgaccgtggttgcaataaatggccatgacagagacaaggccagagcatcccggaggagggaagggagccctcccggctcaggcgctgtcccacacaggcctgacaaactggggtgcctggactctggggtgcctgatgcagagcccagcctgagtcaggaggatgggattacaaggcagctacgatgcaggagggatggtctcgtccacactacagcctgttctttccttccagagttcaggctctcaccaactggcctggcctaaccaccctgggttcccaagggcttcctggggccctcatcctagacaaggtcgccgtcacctctcacctgcctagccagggcctggcctgctcatgacctctcctttgcatctgctgcctgaagccagctggctaaagtcttggatgtcagcctgtgactccattctgcaaatggctttggtctggagtgcccgatgcacttactttctctgttttattagcctagggaagaaaaggggttatcctgggaccatgggtgggtgccgtatcggccaagggtttcttcaaggtgggatggagacaggagcatgtttgtaggaagaggaggacaggagggtgtgagagaggcagcaaggacgttaccaagattcgcgggggagaaggcctgatggggagtttctagaagaggcagctggtggtgtgggagccctggggaaaccgcaatgagaacgaagggaccctgcccatcgctggtactgagagccatgtggggcagaggctgcccctggggcctttcttagctgagaaaagaaacccctctgattctcacccctcccttgtccctgtgggggcatctcaccccgatcctaatgacttactgcagcctggctcggcaattcaggtgctcgtcagttccccctcggtgcacacaggtgtgcgtgccagccaggtgtgggcgcctgtccagcttctctttgcacctgaaagtcagcacaaatgctgtggtcaaaatgggagctgagctgggggtggggacagaaagggaactttgcaagctgagcagggcaggtggtggcgggtttcaggggccgcccaggacaagtcaaacccctcagtggtatgtggtggcaccaggggatctctggggagccacttgctgctgaggagactgtgaagagggagacacgccccctccagagcctcccagcgtcagacaaacagctctcccgagctctggggaggctccgacacagcagtggccagtgtgtcctcagcaggcctcagttcccgtgaaaccagcaggtgggactgagggcacctggaccccttcagagtctgaaccgccgtgaccctgtggcctgccgccgctcctggcttaccctcgtgtttctagaacgtcctctgtgcctccgaaggcaacaccaggtgccgagaaccacgtgttgatggtgttgcagggcccgcgtgtccctgacatggcctcgcacctcagaaacgctcgtgctaaggtgcagaaatggcacagaaatggaaaatgaggagccgggggtctgtgaggctcttgatgcagatacagaaagctcctctggctgaagtaggagaaggaggttggagggaaggctatggagaagggagaggtcctcccaagatgaggaagtgtggggagccgtcctgcagccatggcctcatgctcactggcttgttcggcaactccctgaatgactttgcccaattcctgtccatcttgagtcacttcctcaggggtcggtgtcccaggagatcatcagattggctgagctcaggacacgtctgcccctctggaggtcctagggcaaggaacgaagtgctggtctctttgtcttctgtgatgggaagggcacctggcttcacactcctctaagcatcatgccaatcggaggggagacaccccgagaagaaagcagggtctccttgcaggcatgaggtgcccccatgaccatcaagccccatgaccacttagtgagcatcagtgaaaggcttgagcaggcaaggagatgccgcctgaagaccccagtggagtgcagagctctgggtggggagggggtgcttgtggagaatgccaagccccaagcagaatggatggggcaggcccctcccagagcagcattccagctatttctgcagaccatgtgtcctatttagacagttagacagtggtccccacactaagtgctaatctccgcctcacaaaacttctccaagggaatcagcttaactgaatgtccccagacactgttcccatgaagccagtcggagtatgtttgtgtggctttctttgatccgtctgagttgggaaacttctagggaaaagggaaaggtcctctccaaaaatctccattccctcatcagtccttattttagtcaagaaacctcaatttcacatatttatattcttgggggctgtggtttttcctcttaaaaattgagctgttccactgcctctttgcatagccagacacacagggaggcggccgatgctccaagagcccagagcagagaagatttctcacaccctcccattgtccttgtgggggcacctcacccccgatcctaacaacatcctgcagcctggcttggcaattccagcactgctcagctctccctccgtgcacagaggtgtgtgtgcaggtggggagcaggcacccgcccagcttcactctgcacctcaaagtcagcacaaacgttgctgtcaaaaggggagctcaggccctggggggacaaagagaaacctgcaagctgagtggggcaggtttggggggcttggaggcacagacttctatggctcatcccaagggggctgaaaaccaagaggagcttggccctgcacaggagctttcctcaaagccaggcccatcttccatgccctacacccctcaatccccaattgattgctagtgcttgaggctgggctggaggggccctggccccctctttgcatgttccctggctgattcccacccagaagcagggtctctgcatctcagtgtcctcctccttcctctagatcctagactggaacctccttggtcatgggggaatcggggtctaaggagtctgcggggggaagtactgtcccgccgccccaccccgtcccactccccccgcccttctccttgccctttctgttgctattgcctgcgttggtttgcatgccgttttgcttgtggtctccatagcaacaactaccaaatggcctatggataatagggggactctcggggtgggaggggatcccgatgaggcatttgactttaaaaaatggaaacggtgattctgccgcaggcctggcacggatggtcacccttctctgcccatcatcactcaagcccctcagtccccctcacccaagggcctgcctccaccttggctgggggagggcagggaggccgcaacctgcaagaacaatggaaaggccggagggaagctgaggggccagagagggacaggagcatggagggcagccaggagcctctgcaactatctccatctcatggtaaaaatctctagtcagagtcttctctgttgtccagcttcgtttcgtgtctcaccacttccttccacccttcccagaatccctttctctctctctctctctctctctctctctctctctcacacacacacacacacacacacacacacacacacacacacagaagcgttgcttcatgtcttggggcctggcttctaggtccaatgtcctgggaaataagtctctaattgtttccatgtgtcccgccctgagctgtttacaacaggcattcatagccctggacctcgagccctggtgaggccacagggtcagcacagggatggttcccatttgaagatgaccaaactgatgtgaagggcagagggagggacccaggcctcccccagccccgagtgtcttccacagtgagctggaaacctgttctcaagtctaaatattttacattttatctggactagactttccccattttatttattttcaaagcattttcccagatagtgtctcttgtctattcccacggctccgtgagttcaggagatcgaccctggacggggctcctgcccacgcctcggactctgcaatccttggcagcgacaaccggagagcatggtgagagtgtggtggggagaatatgccataaaaaacagaagacagaaaccaaacacattgcctggggagcaggaacaaaccccgatcgttccctcaacagatgaaacatctgaagcccagagagcttaggcagttttcctgagcatgtctggacacacacacacacacacacacacagagcttccattagcaacagatgtcacaaaaggacaggcgccacctgacgataatctttctactcaccactgtcccctgtaggaaggattctccaggcttttcacagtcaggctagttgttaaaatgtttacattcatggggtgggagaagacctggtcaggtttcaaggtgcgggcagagtgggcctacccatcaagagtggtacacagcgtgctgaatgaagcccagctgggcttaggttagggcaggggaagcccagacccagccctctgcctgttttgtaaatggcatcattggagcacagccatgcccatttgtttgtgtacagtacactgctgcttgcaagctgcaacagcagtgtggctcacaaagcctacaagatttactatctgtccctttaagacaaagtttgctgaccccttgtttaagggattaatcccaagaatgttctcaggttcattttttttctttcccatgcaacagagtcatatggtcatccaattcctatctgtcaatcactattgtaagggaaccatttatttaaggacagttgattgaacccctgttatgtgttaagcacccgaacaacccaaaacacacatagaaggaacacgacgtccctcaaggggctcacaaaatcccaagtgatggtagccaaacacaggcacagggtacaacaaggacgatggtgactgatccagcgtaggctggggctgcagtggtaaaggtggagaaaggctggagaagttagggactgttttctgctgaaggagacaacttactaagttttaaagagccactagctcatgtcagagaaggatctgaagccatatgatttggaaagaacatgagtgcattcggttttgggtatgtggagtttggggtgctggtgacatacccgggtggagatgattcaaatgttttgttatgtgtaggggtccagaattcaggagagagagaatctgggctggagatgtagagttaggggtatatagttggtgtggtagggatgctgccttcttggtgataaaagccttaaccaagaggtagaaataattttctcttcctgtgagcaattctaacagcttgcctttactgctctaaagatattatggcactttgcatttcaatttgtatgtagttggtatctctctccattgaactgtaaacaacagagactttggccatgatggagtaagcatttattattccaccctaaataactaaaaatagaccaactatatacaacaattttcagacattggaccgcaggtgtcacagaagtgtaatctctgacagaggagaagcaaatgaggtgagacccacaagtgccccagctgacaacctggagagagtttccacgccaccatacaggtaagtggaaaccacacagtgttcagtggcttcactgaattaaggagatagtgtttagggtgtggggaggccaaggcagctaacatttgtagggcagagccctggagaggagagagctgcacacagaaagagaggactctagagatctgcagacgactcacttaaggccttcggctgaatattgatcagtgcatgcatatgagaaaattactaaggctgtggaaaaggaaagtagcagatagaagaaccccaggagctcacaaaggctggagaatatcttacatgcccaacagccagtggaaagacctcctcacccaggaaataccaagcagagtcctcagaaaggcattgcttcagaagagggactaaattagccctagactaaaggttgttctaaacgtgtgaaacaaagcttaaaagtaatacttgaagaaaaatcagattgtttccaagtaacttaactatgaactagaaaaagagtacgaatatatttaaaggaataattagaggaattaacaatgtctggcatccaattaaaaattagcagacatgcaaagaagcaggaactaggctctacagccagaagaaaagcagttcatagaaacaaaccagtaaatgacaaagatcataagtttagtacacaagggccttaaagcaactattataaaaataatgtatatgttcaagaaagtagaggtaaacataaacatgatgagagaaatagaagataacatatatattttaaatctaaataaaacttttaaaagtaaaaagaaaactgagatgaaaaatattgtggatgggatcaacaacagattagacacagaagaagaaggaatagttaaattgaagacataagaatagaaacaattcaaaaggaactttagggagaaaaataattgaaaaaataaacaaaacattagtgaagtgcaggacaacatcaaacaatgtaatgtatgtatagttaacatcccagaaggagcagagagagagagaaaaggacagaagaaaattaatgacaaaaaatttaatatgtgatgaaatcaataaaccacagatccaagaaaatcaatgaagctcaagacaagaaaacatgaagaaaaccacaccaagccaccacataatcaaatcatgaataaccagtaataaagaaaaaaaccttgaaagcagccaaagaaaaaaggatggataaataaattatgtttatctaataataaatacacaggaaaaatataaaaatgacagcagacttctcatcagaaacaacacaaatcataagacattggagctaaagttcagaaagggtgagcaaatatcaatttaaaacaataccttgtgaaaatagctttttaaatgaaggtaaaatggagaattttccaggcataaacagaaataatttattaccagcaaacaagcaccatacaaattttttaaggaagtccttcaggtagaaggaaaatgatatcagatggaaatttatatctacacaaaggaatcaaagatatcagaaatggaaaatatttgcaaaatataaaaataacaattttcttatgttttaaatctctttaaaagataaccaagacaaaaataacaacaataacaagatattggagtttatcacatacttttgagattcatacatgctgtttcacatatcaacagtttgctatttttattgctgagtaatattccaatctgtgaatataccataatttgtttatccattcactagttgatggaagctttagatgtttccagtttgcagctgtaatgaacaaagctgctgtaaatattcacatacagttttatgggggcatatgctttcattcctcttgggtaaaaactggggagtaaaactgctgggttgtatgataagcgtatgttaactttttaagaaactgccaaactgcaccatggaatgtctgcaccattttgcattctccccagaagtacatgagagttccagttgctccacattaacaccaaaacttggtattcccaggcctagcacagtggctcatgtctgtaatcccagcactttgggaggccgaggtggaccgattacttgaggtcaggagtttgagaccagcttagccaacatggtgaaaccccatctctactaaaaatatgaaaaattagccaggtatgattgtccatgcctgtaatccctgctactcagaaggctgaggcatgaaaattgcttgaggctgggaggcggaggttgcagtgagccaggatcgcaccattgcactccagcccaggcaacagagggaaacggtctcaaaaaacaaaaacaaaaaaaacttggtattaccagtcttttgaacttcagttgctttaatgcacatatgaattttgtatatgtgttttaatgttcttgcttcactgtggctttaatgtgcatttccccaataactagggatgttgagcatcatttcatgtgcttgccattcatatatcttctgtggtcaagaatctgcttaaatctttcccccattcatggggtagggtgttaaccgctttatcgttgagttataagagttctttgtacattctgagcacaaatcatttatcagagatatgtttttcaaatgtttccctccagtctgtgtttgtcttttcacagtgaggggcaaaattttcagttttgttaaaatatgactgatcaattttttccttttgtagtttgtgctttatgtgtcccatctttgcctaagccaaggttactaagattttcttcctatgttttcttctaaaatttgtatatctttagcacttatatttagatttaaaaatccatttcaagcttttgtatataaggtgagttaggaattgaggctttaaaaaaatatggttatccagttgattcagaactatttggtgaaaagactatattgaatttatttggcatgtatgtattaatagaagtaaaatatatgacaatagcacaaatgctaggagagggagaactgaaaagacattgctttagggttcttaaatcatacacaaagcagcataacattatttgaaggtagacttcgattaaaaggtgtgttatgtaaacttaaaagcaatgatttttttaataaggtatagttaataaggcaacagagaagattacatggaatcataaaaaataccaaatctgtcaaaacaaggcagaaatgaaaggaaaagaaaacaaagaacagatgggacaaatataaaacaaatagcaagatgggcagatttaaacccaaccatagtaatagtcacattaaacgtgaataacctaaacacctcagttaaaaggcagagattgttctgcgagggtgggagtagagaaacactgtatcattcaatccctggtaaccaaaattcaacaagagacatggtaaggtcaagatataatgtttaagaaattatctgtgtcatactggtgggacagccacatcaaatctagtcctaaatcccctggtggaacagccacatcaaatctagtcctgagtcccttggcagcagagatacagcaagctaaataaccacctccaccttcccaccatcttttccccagaaagcagggaagagaaaccttgtcttcagattcccaaatgattaactggggagagaagggggtctgtggtcagtaggtgagactctatctgcagactttccatgaaaatacttgatagaggttaagttggagagaggggaatgttaaattggaaattcaaagttggtctttctgtagctcaagccatgacacgaacccaaacaatgttcataatgattctctcagtaaccatataagaagaatgactgtatcacccagcaaagcagaccctggaaacaattctttttttaatctagtactcaaacgaaaggtagatgaattcagatttttgtagcagtccatctttgaactccaggttggtcaaattgcctttctctgagcttccccagctttctctgctctgctccacacccagcaccacatacactaccttgaggtgattttgacatcatacttgtgcacatctgagctccatgctctgtgacacgggggatggtcttactcagaacagcaaccccagggctttgaccagagcctgacacatgcatggcagaggctcagtaaatatcccttgactgattgacaccctcaatgtagggtttgtgttcgtttctcttcctggggctcaataagaataatgcatgtggatttaggctgcagccaaaacaatggaagtagaacgttagggtgatcattgcagcaaaagttgtttggtctttgttttttgttttgtttcatttttgaagcacggggccagttgctgaagacaagagcagccctgatcaacagaacattctgcaatgatggcaacaccctacccgcaccatccagggtggcaaccaccagccactggtggctgctgagcacttgagatggcaaacgaggaactgaattttacattttctttcatttcatctcatttaggcttaaatagctgcatgtgactagtggtttctgcactggatggcacagccctggaggctgtccccttcctcggtgtgctcctaccggtggggcctgatgaatgttggggggaggggacagacacccccatctgttgaactggcaagtgcgggcgggggagaggaggaattgacctccaaacagctggctttgttctaggcagagtaccattcccccatctcccaccacctccccaggccctggcacgtggcactgcgttggacacttggcacataggacttctctgcgtgccaactcccccgcctgccttcctccctccttaattaactctgcagcagcaactttgtttccctttgccaagatcgggagagggtcctggcatgtgccagcagggctgagagcacaggaacagacccgcacggcctggctccaccccctcgctgggctctaggagcctccccagcccaccagagagcctcgggtcccaggcaggccactggcaggccactgacagtccctgggctttgcctgtgagttaagccgggagttgagtaattgctggctgggttctggctcctcccaggattcagctgggggctagaagatgtctccatcccgggaaacctggcagtcagcccagggggcggggctgagcgggagtgggggaaggaggcccctgggcagctcggtgcctctctccccactctgccctcccgtctctgatgggcaccagcgctccctgctgagagaagctccagcttgggagacgcctgtgtttctctctaataaccagggggctcctacctgccctgcctgccctgctaaacttcccgctgcccctccagcctaggtcttgccacagaggcatctggtcgtcagcacagaccaggcccacctgagggggttgacagacatgcagatttccaggcccaaacccggctattgccacccaaccatctggaacagaactggggactctgcatgtttaaccatcccccacggcgatcctgggactggccaccctgtagctcccagctaggcaggggccaggctgcaaggggccctgcctcagctcctgcaggccgcagaggtaccgactggtcaacagaagcccgggggtcgaaaagggacctccccatgcctgctggttagaagataaagacgaagagtctctctttggctcacagccaggatgaggagtccgtaggtagaaggaggagtctcacagtccctcccctgcccctaagcctctgcagaagtgaggatcctgctctgaggaggaggatctacccagcaagggccatgccagtatttaacagcccagcctcccttcctccagtgcagggcaagcctgtctgcgcttgcttccccctcagggatgatgtagaaaaaccctgtgaccctggcccctccagtcctgcaggtggtcgggaagccctgcctgcttctggcccagtccctggctggagctggaggccctgttcaatgggcaggtgctgcgtggaagacaaggaacctcttcacacggagggcactccagcctgccaggcccagcctgccctgggcgagcagcctccctccctccctccccgcccactgctctccccttaaatggcccctgatgggtgtctgcaaactggagctgaataaaaataaacactacagagtgcctggcacagggaaggctctctaatatttgtgaaaaagggagggagggaggaggggaggggaggtcaagggagggagggatggagggaggcggggaggtcggatgggggagaagagaaggggaggagaaggatgggaagaggagaaggggaatggaggggaggagagaaaggaagagagaggagtggggaggtggcaggaggaaaaggagggagggacagaggaatgaagggagggaggaatcatttttacaaagccaatgggagaacagaaagagtgctgaactggaaattagaggacctgaatttggttctttccctctccttaactaatagcgaaccctctctctccagaccctgtaggggacccactgtctccaggcctccgtttgctcatctgtaaagcgaggggtgggccagtcaccccggcatgagctttgacattttaggatcccagccttcccgctgtggttgcagaagtggctcttaggatcccagccttcccgctgtggctgcagaagtggctcctctccagaacagcatttatggcgtctggactcccgccccagctccctaacggggcagggagctcgcctgctcctgaagcatccgcctcccagcctcgcgcaggtgaggctcatcaataacgatgggcgaggatgtcaggctgcgtctgaagccaccaggggcccagcaggctgccgcgtgctttgtcataaactatgttgtcacctggggaagaatcatcaccgataacatatttcaggagacaaaaacaagaggtgcattgattttttccacgaggtcagacaacttctgggaaggctcctggaactcaagttgtcacggcatctctccctgaatatccgtttgacccggggtgttagtggcctctgacccaggtgggctctttttcctgatcacgggctgttcttttcagaggccagcaccatcactggcctttctcagaccctgaggatcgaggctgacttggatccagggaagatttgctctctggcttcccctgatctggctccgagaaaggtctgcacaggtggctccgggaggggctctgctgacagccaaatctgccatttgttaagcttatgacacacaccagagtgacctgtctatttccctggccaccacccagcccaaaactgaagacagaatgttcaaaaatacagtatattaatagaaaatctgaggcatagtgaggccaacagatcaggagacaactgccattaaaaaggtagtttgcggccgtgagcggtggctcacgcctgtaatcccagcactttgggaggccgaggtgggcagatcacatgaggtcaggagttttagactcgcctggccagcatggtggaaccaccctatctctactaaaaatataaaaattagctgggtgtggtggcgggagcctgtaatccaagctactcaggaggctgaggcaggagaatcactggaacctggaaggtggaggctgcagtgagctgagatcgcaccactgcactccagcctgggcaacagagtgagaccccatctcaaaaaaaaaaaaaaaaaaggtagtttgttactcacagttcccaagaggaggggagcaccacgccatgccgcgccacgccatgccacgccatgccacgccatgccatgccatgccacgccatgtgggggccacacccggagagccccagagggagcaaggggcagaacgcaggcaagcagttcccatgggaaggaacaggcgaggcagggtacacaggtttaggactagctagtttgaataatttcagcaggctctgggacataggagctgtctgtagttgtctggtacctggccctgggggatacaggcaggtggataggggcccagagtgtggttgggaggtgtgggctctagagtgggtgatttgtatttgaaaagcacactcccaggccattgtctgctgtctctaggaactatctaatcctgggagggactctctccagtgtcagcaaagcccctgatgtcaaagtatcacaatacagagaataaaagacgcggcccgtacgcagagctgaagtggctctctgttatttgcagatggaaattggaatctctacagcatgacagacacttgagcagaaattctaagcttttatgggttgccacaggtccctttcaggaggatggcgaaggctatagtcatgagccgtctaaggtggaggtcacgagcggcaggtggctcttaataagcacttgacataccacttctcccaactgagatgtgctgtacgcgtcaaatccgaactggattttgaggattcagaatgaataaaagattgaaaaaatctcattcatgatttgtatattaattacatgttgaaatgataatatgttggatatattgggctaaataaaatatattatcaaatttaagtttgcttgtttctttttattgtgtctgctagaaaaatgtcctcagttaaaatcacctcagtggctcacattctctctctattggacaacagggctcttgacctccctaggggaatggacccaggcacacatgatgcaggtaaaatatggtattgaggggtgtgattccaggatctgagggtacaccgaccccaagttgatttcactctctctttccagaattatagggtgaaaagaaccctagagaaggatccctggccccagacacataactatcagtgagaacccacagcattgaaaagcaaatctttcccaaagcttcatgttttgagccagcctgctgtaaaactttgttaaaaaaaatcagtagacaataaagaagaaaatcaaactttttagccttgattaagtggttcgatggagagaagagtggtagcgtgctttcctcgttggctgataatcgattcttttcttggtctgagccttggtatggcttaggagcttgcccaagccagcactggtgtggggcaggcagggaagggctgggactgggaattgcttccccagccctggatttaacttctcaggacagatgatggcttgtgcacgtcatcagttctccatggagagaggctctgtgtcctttcccagaagcccaagcactggttttcactccctgcgagccagaagcaattctcatggcattatacagttcctccgtttctgaaatggaattccccctctcctcacttggtctgcactggtcccagggaaagtttgctcagcgctcttcctccacccacccttcacatggtggcagtggctcagtttaggggttaagcccagagagtttgaggctgtcaggtctgagagctgcccttgtctgtcagaggccagctgcaggatttggagccagttacttcctctctctctctcagccccagcctaagcttggcaaaaggacaatgacaacacctctgtggtataataaagagtatgtctttgtccctggttcctggcacagaaaaccgttggaatttcctgaatgataggagtgtcttgattgtgttgatggtgtgactcctggcacatgccaagaggacttcaggatggaggctgaccaccaaagaccaaccacgtgataagagggctggaacttttggtccacccaaagtccggagaggggagaggggctgaagattgagttcagtcatgaggacaatgatttaatcagtcatggctacgtaatgaaatcccagtgaaaactttgggtctggtgcagtggctcatgcctgtaatcccaatgctatgagaagatgaggtgggaggatcacttgagcccaggagttcaagaccactctggatatcatagtgagacctcctctctactaaaattaaaaaaataataattttaaatcaaccaggtatggtggtgcccgcctgtagtcccagctactcaagaggctgaagcaggaggatcacttgagtccaggagatcgaggctgcagtgagccatgatcacaccactgcactctaacctgggcaacagagcgagactctatatcaaaaaggaacaacaacaacgacaaaactctggacactgaaatctcttgaggatatcaattccttaccagatacatgatttgcaaatattttctcccattctgtgggttgcctttttactctgttgatagtgtcttttgactcacaaaaggttttaatttttatgaagtccaatttgtctatttttttcctttgttgcttgtgcctttgacgttatatctaagaaatcgtcaccaaatccaatgtcatgaagctgtatccttgttttcttctaagagttttatggttttagctcctacatgtaggtctgtaatccattttgaattaattttggcatatggtgttaggtcagggtccaaattcattcttatgtaggtggatattcagttttcccagcactgtttgttgaaaagaccttcttttcctcattgaatggtcttggcacccttgtcaagaatcattggaccatatatgcgagggtttatttctggggtctctattctactcttttggtctatatgcctgcctttatgccggcgccatactctttggattactgtagctttgcggtgagtttcaaagctcagtggggcctcctggttgaacacatggatttgctgggaaagtgatgcatcctgattccacaggagaaggcatgaaagctgcaagtccaggatgctcccagaccttgttctatgtgtatcctttataataatgctgtaatcgtgggtgtagcacacacccacgttctgttagtcattctagtgaattgttgaacctgagagtatcatgacaacccttgaatgtgtacccagctggtcagaagtgcaggtgtcctggggaccccggctggtgtctgaggcagggcagtcttgcgaaggcctgagcccttgacttctgcggtgtgacactaacttggagtggttagtgtccgaattgaatggagttcacccagttgggatagaagcagaatgccttcataacgttgttataaggattaaatgaactaatcattataaaaactctagtgccctacacacatcaaaaactctgctgacggtaggtagcactctcatatttgattttttaaataactgtcttcttctgcttctgccaatggaagataacactaaagcctgtcccagcctaactggccttgaaagagccacgtcacctctctgggcctcttttcttcatctgttaaacgaagagaccaggcaagatcacttcccatgcagcctcagtctctaaaatttgatttcatgtaccaaattgtacctaaaatatgcttccaatcttgaaaatgtaatattctatggtactccaggcttcctcattaataaagagctctagttcaagaaagattcatttccatgggaaatcataattgaacggcagtgggctccccgcctctgaaactgacgatgctcaaacagcaggggacaccaaagcacagcgcccccaggtgagcactcacccaaactgcaggcaaagtaccttgaaaatcaaatgccacggaggcagctccatcctcaagagtgaaagtgtctggtctcaagactcaagatagccaggggccgagtaagcaggatttgggcaggactattcaatattcatcgagcccagcctaactttgaaaggctgtgcaaattgtccaagaccgaattgggctctggtgagtgtattcaatgacttccattgcttcctgatcctcttaagtccgtgactgtgtgctatttagataacaggaagctggctttcacctgtgaaatgccatctctccaggtctttccaagcctccctcctctgcctgtcagccacgtctgccttctctttgcagccggctgtccaccacagaccttgttctttctcacctggcttctgagggcctgatgttcttggcttctcatccaggctcacgccttgtgcagggcccacatctccagccctgagaccctgccctgggcccacccctcgctctgggaggggaggcttactatcagaggaacggagtctcccagtctccctccatccctgatggcggttgtagagatgggacagtggtggtttctactggtaactagcctggctccctctaaagcagcagtccccaacctttttggcatcggggactggttttttggaagacagtttttccacagacaggacagggtggaggagtgcaggatagttttgggatgaaactgttccacctcagatcatcaggcatttagattctcatgaggatgacacagcctggatcccacacatgcacagttcacaatgggattcatgctcctgtgagaatctaatgctcaggtggctcctaacagggcacgaagcagcgcaggtccatggcccggggttggggaaccctgctctaaccgatgcaggttctgtcagaaccacatagcatttgtgctggaagaacctgaggcatctcctgaagcaacccctcacatcaccaatgaggaagggacccaaggtctgcagaggggaatagccctgccctgggttgcatctttcacaggggtggtgtgagttcaggaggtccctaagaccatcctcaggttcaaaaatttgctagaaggactcacaggactcgaaacaggcattctactgccatcggtacagtttatgacagtgagagaatatggattaaaatcagccagtgggagagatacatggggcagagttgtcctggagagacaggcatgggcttcgattgtcctctcccaatggaattgtgtggacggtacttgcttctccagcaaggatgcgtgacaacacacacggggtactgccaacagggaagttcacccaaaccttggtgtcccgagttttacttggcctcggtcaggtagacacgactgaccatccatgtgccgataccatgtggcccaaggcccctacattgaagtgtaaactaactggctgccccaagaccccagggaaacaaagacactcataccaaggacattccaagggcttagcttttccctctcaagagccagaaacaaagagccaaacctttctttgggggaggttaatcctttaccacacagaagggaccccgtagtgctcctttgaaaatcccctccataccagctagagttctaggcacacaccagttatttaataataaatgcttagtgcattgaaggcatgacttgtcagctcttattttttctatggactcatcgaacatgattcttttaaatttcctcactgactatcacgttcacgtctccagcagcacactgccaagaaacaggaagaaaagaaaaaggtccctgattagccaaaattggtatcatatagtcatatccttatcagccagaaacttgggtctcacccacagtctactcattttatctacttacttaaacagtttgagtacaaataatttggttttacaacccacagtgcattataaacagcaaattacagggggagaggcagcaggtagaaaagacagagtgttgcagacatatcagtagcaggaagacttgagagcaggccaggtgtggtggcacacacctgtaattcaggcattttgggaggccgaggcaggaggattgcttgagcctaggaggtcaaaaccagcctgggcaacaaagtaagaccgcatctctacaaaaataaataagttagccaagcatggtggcgtgtgcctgtagtcgcggctacttaagacactgaggtgggaggaccacttgagctcaggaatttaaggctgtagtgggctatgatcgcactactgcgctccagcctaggtgacagagtgagaccctgtccaaaaaagaagaagaactggggacagacaagaggaagcagggagcagaaaaaatatgaaagacactcgagaaaccaaacactggggccattttgcagaagggcagatgggtctccaagctatagctgccatgggctcagctgcagtaggacacagcatggtgatgagtggccagagacatcattcctgaaacatcaagggaaggttaagtgtggtttatcatctaagatggcagaaggcaagccatgcattttaaaaagacattggtaaacttgcagctggtggaaaattctccagcctggagtatcccctttcccacgggtgctgattaaaagcatccgtgtgtgtgtcctattctcttagagacttctgcccccttccttctacctgacacttaacagagactgaacacaaaacctactaaaaacttgattctcaagagctacatccacttctgcctcgaagggctccgatccccaggtgagccagtctcgggctgttccctgggtggtagttgtggactgcaaatgaccttcaggacatctgcgaagttcatgagggtagagggtggggatgatttaaaaagacagccctggaggtcgggattcacagggcaaccgtcaggaggaaactggaagggccctcatggggtccctggggcctccctctctcagccagcggggaggcgatgggtctggttcctcgtttgttaagctccagggacaagcgaaactgcctcccgggggacccaggcaaaaagatctcacttcactttgaaactctgggactttgtttctctggagcagactcagagctctagaggctgacctgggcctgaacctggacggggcttggctgtaggaaagcattctgacgcaacaggcacccgagggagccggtgaggctgtcttcccatctctgcaggcctcatccctcgtttcacgtcttcctggttctcattaccagcaatgctttcctcccttgctaccctcttctaagcggcctctgctcctctcaggcctgggtccaatgtgcccatggagatgctcaggccttccctgcccactatggtcctggcctcaccactcactgctctcctggctcctgcctgtccccacaccatccacgccacaccccggcacactggactgcgctttactctctgccctgtgtgtcctcagccaacctctctcactggcaaacacccaacctccttcccattcagtcttcatcttgtctggaccatagaccattgtgaggttttgaccaacaccatgggccagaacagggccaaacacagcatctagggaggctctgacctcccccagagtccagccaccaagcccctggaggccgatagacccaactccaggccacagctcagaggtcgctgctacagcagagcctctttggcccattcccccatcagccaacttttactgaggggttgccatgtgccatgcccaggggtgggcaccactaagataattgatcaagaagtgcctctcctcctcctggagctcttggctcatgcctttatcatggtgcctgttgtctgctttgcactttatctgtttcatgatcagatccccaagtacacaacaaagtcttctaggacacacacaatcacaaatcaatgttttcatacccagcagagctagcactcaatttaaatgtttgttgaatgaatgaaggaatgcacagtcacagaacatgttaaataaacatgatgtttgcaaggctggctgattggaaggacatgatcaccaaaggccctgcctacacttggcctgatcacccagggcccaaccattcttattaagaatcatgaagttctggctcttacatagcctttgtttctcatttgtatgctgtgttagtccattctcatgctgctaataaagacatacatacccgagacagggtaattcataaagaaaagaggtttagttgactcacagttccacatggctggagaggcctcaccatcatggcagaaggcaaaggaggggcaaagtcacgtcttacatggtagcaggcaagagagtgtgtgcagggagagtgtgcgcacaaaactatcagatctcatgagacttattcactatcaggagtacagcatgggaaaaacccgccctcatgattcaattacctgccactaggtccttcccaggactcatggggattatgggagctacaattcaagatgagatttgggtgaggacacagccaaaccatatcatatgctttacacagaaatgctccttattatgttgactcttgttcactttattgttttattgcatagtgtgtatataaatcattttttctgtatgtgacagtgtggttagagaaactgggcattcttcttaactttgaacctgattataataacacccttggagtgaaacaccacagttttgcaaaatgatcatatccacatgacctcatcctaacctcataatagctttgtgaaataaatgggtatcggctcttatctccaatgttaagaccaagaactggtagctcccaaggattagaagacttgcccaaggtctcgcagttactacccagccctccctgctacccctcctaaagattctgttcctcttctggatccctggtagctcactgtcccttgcccacaaagccccttaccctctttctctgcttttgccctcccaccttggagaactcactggtcactccagtctcctgcccccaagatgagaccttgagagagtcaattctgctcatctctttccgactccacgggctcagtgacatcacaccagtggtgtgagatcagctttggcgggagtatttacaccatggtaactggccaagtcctagcgtccatcccaggccctctatcctgttcccttgactctgcctcctgactccaactggtcaggtcagaaccctggaagctttgggtctctctgagagaactgcaccctttccccgagcactgtggagcaagagctgctgtgctttgccgggaagggtaggtcctgcctgcggagacagaaggagcctccctgggagggggcgggagtcagcagccaggagttgagctgtgatgagccctggagctcattttctcctgcttgagcctcctccagagcccccttataaatgccagtcaaaccttatgattttcatctttcattattcagtgaggagaaggcagattaaaaatacatgatggcattttccaggtcggatcgccaagcatggtgagggtgtttatcaagggtccttgttcctgctgtggcacctgggatgtaaagctcagctcccctccctctcagccccctgggcctgccccagcccagagccccctccgcctccccatgcctcattcaggcatcggctgtctgggaagtgtaagaccgtctcctgccagaagaggcaaggcctttgtgttttattgaaagagacaggatttattttcattgtcctttgccttctgtgctttgaggttccctaaagccgggggattcaggaatgagcaaagaaatcagatcctccgtgagagtggctctctggcatgtgggcgctgagaggattagctgcgaatccactcctgctttgaaatctgcttcctcattaggccttattgatccttaggtaggacaattcccagctccgctttcattttaggaaaattgctagaaacctcaccctttctttgtatagggctttggtgtgggggatgcttcaggacaacctaagctgtgctggctctgtccccatcctgggccccatctctctctccagacctccctgactggcagatccatcagttttcccccaaaagccaccaggaagtagaacaaaggcccctgaggcacaaggcaggggtgcctgggaaggatgtggggtcttctggggcaagggttgcagggctgtgtatcccccctctacccagcagcatgttggagccagcttgcaccaattgagaagaggccattctttccaacgctgtgtttatcaacatcactttggcagcttgcagttggccatagtgggggtatctacaccatggaaattggcaagtgtgaccatcagggcttttatttttctggagagcgacttgttcagcatttaccggcacgccacctcccttctgtgtgttgcttctttccctccccaggactaacccgtctgccaggcacgtctgcagggaactgctgggactcagaaagcaataccttaattgaaggcctcagaagcaaaagcttttatctgaccctctcctgtccactatctctcaacctcattctcccctgaggctagccatagaaactgcaacccctcttctccaagggggtcactgaaaccagaacctcttttccccaaagccagccataaaacctaaaatacatgactttaaccttccctccacctttctgtgtaagaactggccataaataaatgatctgtcctaccttgtttgactggaggccataagacccccatgccagagagggtccagctcctcacccagaaggaaggaacactgcacagagaggccaagaagaatctaagcggataggccttactgagcttccccactcagtccgtcagcatcagctcaaaccatgtgtgttcaccctgtttctacacggctggttatacttcgatgaacataaaatggacaatttcccctgtatcttttggtcttcattctgaaggctgctgtgtacacttcaataaattttgcatgacttttcttcaatgaatctgccttttgtaagtttgcagcaaaagttcagagggcaaagggaacatggaccctacagaaccaaccaagcaaggactaaggagggtgagtcagaaccagaaaaagccagtgggcgcacccgcctttccacataacagagctggggccttgcgtgggcttctccatttatcccagctgatgtgaatgggggctcctgagccaggctcagtcaaagccccccactccatgcagaggcccctgtggggtgagaaggagcacaggggagagacccacagggggacgcccgtctcctccccaccccaggctttggttccatctccattctgagggtggtctctgtgcctggggtttgggggagtgagtagtggggatcctgcttactctggctcaatggcagtgcgtgcaggcatgtggggaggggagggtgtggcggcagaaatgctgctcccaaccacacatggtggctcacgcctgtaatcccaacactttgggaagccgaggcaggtgaatcatttaaggtcaggagttcgagacatggcgaaaccctgtctctactaaaaatgcaaaaactagctgggcttggaggcacacgcctgtagtcccagctactcaggagactgaggcagcagaatcacttgagcccaggaggcagagattgctatgagctgagatcacgccactgcactccaacctggggcacagagtggtttttttccatctcaaaaaaaaaaaaagaaaaaaagaaaagaaaagaaagaaggaaatgctgttccccgagctgcgaggctgggcacagccagcttctgttcatgatcccagaggtagatgcctcaacacccctgcctcagctagctccagaactgagcccccaatctccttcccgaagtctccccaaagccttgtggttccagccgcggctctgtcatgggggcctgctccccaggaaagggctgccacctgtttgaaggagcagtcaccaggtttcctctaacctgaccttggcctccttctgcttttaaaattcgctccaagaagacattagcatgaatcccaggggagggttccaggccatctggggcttttcctcaaggacaatgaccccaggggccagggagagcaccagtgtggtaaggagcggcctggccgatgagagcctggccctggtctgggccgccccaggagaaggagctccagccccatctgcccctcaggagctgcctctgctggccctgcaggtgatgggcccctctgcttcgctgcaggtctcacctagggtgtgggtggggccagggttaggaatttcactccagcttggtcttgcccatcctgagcagcccaggaaggctccggcagagagcagggcacacccagaaactggaccagacaactagaacccctggcccaaaaaggaaaaggtgatgtctgatgtctggctttttgtctcctctggctaccctgacccaggggattgtcccagagcagtacatcagttgccacttcctggacacaacctagtgctggcccatctagggactctccctagttcattccaattaaacagaggctttagcctggctcccagaaggaaacagctccggcaaagcaatgaagtccccaaccatctttgcctaaccccctttcaaattaaaaggggctctaaagtctaattatggcggggaacgtgttgcctctttaaaccagaggatctgactccactcaagggatatttgtgcttgcctccagcctcccctgagctaaaaaattatatgctttctctctctgctaaattacaacatcctcagattggtgctgggcctgaagggagtccctgccggaaaacccaagtgtcgactctctttgcaaactctgagccagtaattggtttggaaatactgagtgaatggctcaaaaggcttcagggggattaatgtgaaataatgcatcccccgatggcaaggggggcacttacgtgggcatagatggtggcaggcacggccagctcctgttcattcctgtaaatttcagcccatggcggagaagcatcattagacttccactggaaatgcagcttctggagcccaaaccagcccatagagccaaacaatgttgcaccttctcagccacagccccttccttccctcaggggggcgtctcacctgcattcccctcacttgagcatccttgcaggccagggaagaataaaatttggctcaaggcaaatcacttaaccattctgagcctcagtttgctcatctgtaaaatgggaagaatgattccagtgactcatgatgaggatgagatgcagataagaagtgtcgggctctggggccagccatgataggtgctgggcacatggtgatcagtcattattaggacagggcttagctctgcaccaggcacatcgcaggttgtcagtaaatacctgtcaggcactggataccttggggactggatacacaggtagtgacaggataagagtaggaagaggtcaggcagccttcaccagctgggccagctatccctgcaatgccaccctcagcaaagactcctgcagaggaagtaacaagcccatctgccttaggctggagcaacctgggacctccttctcccttcaggcgacactaagcccaggtttcagagcaatgggaacgagaggggcaaggtttctaactcagcagatgcactcagaaggtcactctgcagataccagggaacacagaaattgaaccagtgatgtctcccacagggatgccctggaaaggaattatgtgcccagaagaccaaagtcaggtacattctggtgtacctccccactgtctctttcaattacaatgactttctcttttttattagttatgtttaacaaattctaacaatgagaactgttgattgtagaaaatttttaaagcataaaaagtaataagaaaaaaagtttccatacactgacaactcagagatacctgttgaacatttcctatgcatttccttccagtcttttttctatgctgcagtttttaaaaacatagaactatccagtgcagagcagtagcctgcacatctggagtcacataagagtcacttagaggccttcgaaaatataaatattatttcccctcttcctatccccctcccaccctatgctgagattctgactctttaagtctgagatacagactgaaaaactatctttttaaatgacctttaaagtcccctaaatgaatattatgtgcagtcaaattttgaaaacaatgtacaatattgtaccttgcttttgaacttgatatcaaaagatggctttcaaagcactgttcttaaggtcctcacatttgttcctatttgtatgtggctctctgtcagactgcaatctttttttttttttttttttttgagatggagttttgctcttgtccccaggctggagtgcaatggtgcaatcttggctcactgcaacctctgcctcctgggttcaagcgattttcctgcctcagcctcccgagtagctaaaattacaggcacacgccaccatgcccatctaatttttgtatttttagtagagatggggtttcaccatgttggccaggctggtctcgaactcctgacctcaggtgatccacccgccttggcctcccaaagtgctgggattaaagacgtgagccacgatgcccagcccagactgtaagctttgcagagcttctgatgtgctctggacatggtaacaaagtggttccattcccacagtcgctttgggtggccactccttggcttccaatcacatgccttcattctttcatttgtgcattcactcattcatgtagtgggtacttcctgttactgtccccagaaccctggaagcagctgccttttttttttttttcctgagacggagtcttgctctgtcgcccaggctggagtgcagtggtgtgatctcggttcactgcaacctctgcctcccgggttcagtgaacccagctcccacctcagcctctagagtagctgggattccaggcacctgccaccatgcccagctaaatttttttgtatttttagtagagacggggtttcatcatgttggtcaggctggtcttgaactcctgacatcaggtgatctgcccgccttggcctcccaaagtgctgggattacagacatgagccaccacgcccagccagcagctgcctgttaacattaagcaacttgatcacggtatgccacagaatcatagtgacgcctcaattcacaaacatgctgtgaagaaaacttctcaatgaaattcataatgttgtcaccattaaaaaatatcttcctgtgtcacacagacagcgactctgctgcataaccaagcagacagaagcacgaaggtgaccaaactgccatctgccgatttcctcaaggattttggtttttacgaatgtcctgggccgggagatggccagtatggacactatgcagttccatgttcgatgattttatgccatcttgggcttaaacagtctcggctgggaagaagcctggggaaggcagaggatgagcagcttgggactccccagcagcgagaatgttctgctttcttgactcggcgtagcaaccatgggcttgagggccagaaagacctgagtttgaatcgctcctctgagacgtgctgtggggccacgggtaaggagtgtaaccgcaggaaccgttttctcatttgtgcagtggagattctgatactcactgtagtgactatgaggcttaagggagtggggtataaaagcatttgtgcactaattatatgcagtccatgttcaagacgggttcctgtcttcatcttctccaaaaagatattgacactctgcattctggcattcgacactgtttgggaagctttgtgtgtgtgtgcgagagacattatctcattctgtcacccaggctggagtgcagtggtgcaatcacagctcactgctgtctctgtctcctggactcagtcgatcctcccgcctcagcctctcgagtagctgggatgacaggcgtgtaattcccacgcgtgtaattcccatgcctgtaatacctagctaattttgtttattttttgtagagacaagagctcactatgttgccctggctggtctcgaactcctgggctcaagtgatcttcctgtcccaccctcccaaagtgctggaattagaggcatgagccaccatggcttgcctgggaagctcttaattttgggtcataggtggtctttcctgacactcaatactatggtgcagatggaaagagccataggagatcccacgggctccagaatccctctctctcgtacaccccattgaggaggtgtgtgggggaggggctagagaacccttttgttcagtgacccaggtgattcggatgtgtaagcaggtgaggagatgcctccctccactagcagcatcctaacaataaagcaagtccttgatagcacatcacagaagcctggggcgcttcagtaggggctctctctgagacacgcaaacccaccgtgtttagatcccccggatctttagcttctctccagctgaaggctctgatgctcactggccccaagcttcccacgaaggcagactgcggtgcccagttcaccccacctctctccaggtcctgcctcccacccccagccctgaagccattagctctggcctggtgcctgcagaccctggctcatggagaggcagcatggtgcagtggctaggggcgtgtgtgtgagatccacactcgagctgtcttataaagtagccgccagccatttgagttactttataactcgaatccaaattcatcaattaaaaacccagcgcctcagtctcactagtgagaaggagaaataagggcagccctggcctctggaagctggcctgggcctcactcgggagtcctgttctcccgttcactccctactcagacaaggccgctctgaaaccacaatgaaatgagacagagcgaggatgcacgtgattttgcccttgccctttgaaggcattgaatctggagtgagctcctgactcctcagaccctcccctaagtcagccatagaccacatcctagaataagtcctctctgacaccccctccctgtgacaccctgtagttccacatggacgtgttctccctcactgcagccaataataactcagcttgttcaaccgcaagtgcattcctggtggtctttgactgggacgacattgactagctacacttcaagtgctcagtggtcacatgtggccaggggctaccacgctggacagcatacccagaaccattctgccactgtagaaagttctgctgagtagcactggtctacatgatctgactccaaatcttgactgcaattaagcagccgtgtgaacaaggacacctcctgtaaccattctgagctttggtttcctcgtctgtaagatgggagttgtcctgaggattaaatgaggcaacacatgttaagcacctaaccttacgcctactgtggtagtctttaaatatgttcttacattctttgattctcctccctttaagaggtggaatttaatttttctcttcttgaaggtgggctgaacttagtgactcccttctaatgaatgaaatattgcagacataacaacgccacttgcaaaaccaggtcataaaaggctgggtggcttcttccttttgttcttcttcacatgctcagggaaagtcggctgccatgttgtgaggacactcaagcagccctatggggagggccacatggcgatgaacaaaggcccccaaccgacggcaaagtgagggagccactgtagatgtggattcttctgcccctgttcaacctgtagaggcagtggccctggctgacagctgcactgcaacctcatgaaagactttgagccacaaccacccagtaaagccatgctcagattcccaagacctcagaaactttgtgagataaccaacatttcttattttaagccactaagttttggggtaatttgttacacagcaataggtaactaatacacatggcatatgagtggcacttagtttgtgttagccatgctagccaatggtccgtggagctggcctacagggaaagaatccagatcagctcacataggcagcgggtctgccaagttgttctccatatggcaaatggagaactgacctctggtctttgatgtcaatctgtgagtgtggtcagcggggtcactccagagatgagccactggactcaaagcaacagccaggaaatgagtcggggatgacacatcggggttctggctgtccatggcctaggacagctctcaggtacagcctaccagggagcaccttgtgagccagagagggtctttccagcagaacctatgggtcgcctggcatccacactgtagccctgagcctgtagcaggctgcccagggacccacgggtgaatttccacttttccaggagaggagctatgaggttggaaaggcagagggaagcccagcatgccccggccttggcaccagcccttccttagctcagccctcccctgtccccaccagagccacaggctgcttcaccgaggtgaacccttcctgcttcctgggaacaccacagtgtccccccaggaacacacaatgtccctggcacgaaggacagtcagagagagcatgcaccgccccacaccactcagagacccccatctccagaaccccctccctgcacaaatgggctagaaccccagagagaagaagagggcaacccaaagcaagaaggcagcctgggaccccacggcccttcagcgtgtgactcagggaacatggtgcattcatcccagaactgaatgtgcacatccctggttctctctccacgtcccacagccagggaagggagggtgaccctgccacaagcacttaacaagttaacctgaaatgccccgtccctagctccccagacctcagggcctccaaagggagtgaggcagggacacccagaacccttgcaaggacattaattgaatgttgaactctgcactcaaatgaagaggtatgtcaccccccacccaccttgaatgcacagtctagagctctctaccatactctgctggggcccctccatctggtacctaatggctatgaagaacaggggaccccctcttttttgagtaactgcaagtaagccgtctacactgggttaacaatatgtatttatgatacaaaattgccagcggcttctgcattttcacacgtgtttgttaatgaaaagtaacccgggggtcaggttattatgtaaatatccactgtgggtgagggggttggaggtgaagcaccccataatgaggtgcctccatccatctctcaggagcgctaatgaatattggatctggtcatttgcccggcactcaggcctcactttaccaaacagagggacgggaaggacgtttgagctcaaatgaaccacttctcccttcatttccgcgtgaccccagtgaatttcaaccctcccacctcctccctccccattccaccatgctcgggtgttcccgagcccacagaggcgagagacaagggacattggctggagaagcttctggctgtttatagtttgcaggaatcacaaaaaaaccacccaccctgccttgctgcctctgactcagaaaccatcaacctgcgcctcccccagaaaataagatgagtgaggatagagtggtatcctggagtcccactcagggtgggaggcgttaaccacgtggtaggggacagaggtcctgcagttgacccaaggaggggcagccagcctcttggcatctgcaaacaggagtagtggactggaccaggctgccaggtgaggccaggagaggctgagcagcaaagaccaccctgtcaggaaggcagaccagctgcacacacagggttcccaactgcaggctgtagggaagagtctaccttgtatttttccagtgcccaagctgaaggctccaaccaatgccatcaaaggcaggaggcagctggtcccagcaggctcagtcttcctgacggtggaaggtccgcctgccctccctcccagggtctgtgcaaagctcatttagggctctgagtaatggaatgttgccactggggtgtctctacaaacgagatactacatctcccaagacttccctgggtaaataaaagctaaatataaatgatgtgactgtgtcgcactccagctctgcctttgactagagggaacatgctgaaatggttgattaaaaataaataaaattaggctcttctagttcctcccaacataaaggcagggcttctccctctgagccgctgagataaagccgcccagcctgtagcaggagctcctggggtcccggccatgcgtgggttatggctggttttatggccgctgtatgatttacacccacttgcaggcatgtagcaaacagatacatttttaagcagtaattgtcatgtatatgggcccttgagtgtctggagaaacgtctctccagaggaagactggtgttctgtctctcccatcaagagcaggatcgtgaagagcaggtgactggggataaatttcaggggctccccctggggaccaggaagtagggacatcagtaagcccagcctggccttcctctgcccttcttggaaatgctgacaaacaccaacactggaaactgctactgtcaccccacttcccgcacggcaccctccacaacaggaagacccccgctgcaacatactcctttctcccaggctctgggctcgggtggggaaggacaaggtcagcacctcaccttttcatgctgccctcagtgctggggttccaacgctcaggtggctggacccaccaacaggatggaggcaaccaaaggaagcagcttggtcctttttttttgagatggagtttcgttcttttcgcccaggctggagtacaatggtgcaatctcagctcactgcagcctccacctcctgggttcaagcgattctcctgcttcagcctcccaagtagctgggattacaggggcccacaaccacgcccagctgatttttgtatttttagtagagatgcggttttgccattttggccaggctggtcttgaactcctgacctcaggtgatccgctcgcctcagcctctcaaagtgctgggattacaggtgtgagccactgaacccggcctattgttttctttctctggccttcttcaaagttctccctcactctcatctctcattctttctctgcttcctcctttcccttcctttttctcctctatttcagcttttctctttgtctccctcccattaattggccagaatacataactgaagtttataaacttctctttttttttttttttgagatggactctcgctctgtctcccaggctggagtgcagtggcacgatctcggctcactgcaagttccgtctcccacgttcacaccattgtcctgcctcagcctcccgagtagctgggactacaggcgcccaccaccacgccaggctaattttttgtatttttagtagacacggggtttcactgtgttagctaggatggtctcaatctcctgacctcgtgatctgctcgcctcagcctcccaaagtgctgggataacaggcgtgagccactgtgcccagccatattgcagccaatttcaaaccaacgacatgacatctctgaacccatggtgggaaagagatgtagccctcatttcataatagttccaccatgcgaatacaagaaatatcactcgccaacaacactgtgactgtcacagcaccatgacggcattcaacagcaccttgactgcattcaacaacactgtgactgtcacagcaccgtgacggcattcaacagcaccttgactgcattcaacaacactgtgactgtcacagcaccgtgacggcgttcaacgacaccgtgactgcattcaacaacactgtgactgtcacagcaccgtgacggcgttcaacagcaccttgactgcattcaacaacactgtgactgtcacagcaccgtgacggcgttcaacagcaccttgactgcattcaacaacactgtgactgtcacagcaccatgacggcattcaacaacactgtgactgtcacagcaccgtgacggcattcaacagcaccttgactgcattcaacaacactgtgactgtcacagcaccatgacggcattcaacagcaccttgactgcattcaacaacactgtgactgtcacagcaccgtgacggctttcaacagcaccttgactgcattcaacaacactgtgactgtcacagcaccatgacggcattcaacaacactgtgactgtcacagcaccatgacggcattcaacagcaccttgactgcattcaacaacactgtgactgtcacagcaccatgacggcattcaacaacactgtgactgtcacagcaccgtgacggcattcaacagcaccttgactgcattcaacaacactgtgactgtcacagcaccatgacggcattcaacaacactgtgactgtcacagcaccgtgacggcattcaacagcaccttgactgcattcaacaacactgtgactgtcacagcaccatgacggcattcaacagcaccttgactgcattcaacaacactgtgactgtcacagcaccatgatggcattcaacaacactgtgactgtcacagcaccatgatggcattcaacaacactgtgactgtcacagcaccatgacggcattcaacagcaccttgactgcattcaacaacactgtgactgtcacagcaccgtgacggcattcaacagcaccttgactgcattcaacaacactgtgactgtcacagcaccgtgacggcgttcaacagcaccttgactgcattcaacaacactgtgactgtcacagcaccgtgacggcattcaacagcaccttgactgcattcaacaacactgtgactgtcacagcaccgtgacggcattcaacgacaccgtgactgcattcaacaacactgtgactgtcacagcaccatgacggcgttcaacagcaccttgactgcattcaacaacactgtgactgtcacagcaccgtgacggcattcaacagcaccttgactgcattcaacaacactgtgactgtcacagcaccgtgacggcattcaacagcaccttgactgcattcaacaacactgtgactgtcacagcaccgtgacggcattcaacagcaccttgactgcattcaacaacactgtgactgtcacagcaccgtgacggcgttcaacagcaccgtgactgtgttcaatgccaccaaattgttgacttttaaaatggttcattttattttatgtaaattttaccttcatataagaaaaaaagggatgagttggtccctcaaaccccttccaggtgtcaaattttgtggattatcatctcatgtgttcccatcactgcactcccccctcggccagacgtctggagacacctagacaccctaatggtccctggtattggaacaactcaccacagcgcctcaattaatggagaagaggggatccttcgtggccagaacctcaagggaaaccccacacaggaggagcacgtgttccagcgtgccagagaagggtggcagtgatgtgggggcatcgtgaagtggctgcatggagagtacaggatccaccaagaagctggcggcacccatggaggagacggccctgggtcaggtctggggagcctagcggggaggtggggtgctgtctgggggtggggtagggactggggagccccaagtaggggacggggatcaaggtggaggccacagaggatattcaaactggtcaaaaaccgtgacaaatctgcacatcccgaatatcctgtttcttcctatcacgccccagggtgctgtatgggaacacatgacattttccttaaaaggttagggctccatccctaagcatccctaattcctcccaatgacccatctgtgtattagaacatgcttcctggatctacatttatatagcgtaatgtgtccagagacgtttcctggggaacccgtggtaatcttttgctgagacctgcagaggtgaggcgcatgtccctcacaagcccccatctccctcaaccgccgttccatgggcgtgtgggtgagtacaccctgcttcctcccaaacttccttccaaatgagccctcccgatgaggacagagccctgcatgggcctgggggtgattatggagtcccctttgggccaggggcacgaggacacagagccctgctttcgggcccagcctcgatctgggccttatgagtctctctgcccagttctctttattctcccttcatttttagaaatgaggacaccagcctggcttctgctctactaagaagaatgaggagaacagagtttttattctgcttggacatgagtctaaaaaagtgagtcccccatgggtaaaccccagagggaaggtggctcgccctgcccacaccagccccccgacgcagcctcagatgcatctgcactatggtttctgttggtatgggagaaaacattgataatccttttcttctgcaatgagaacaatccatgtaatgtggagaaattagaacttacagaaaacatgaagaagaaaatgtaaatcccagctgagtgtggtggctctcatctgtaatcccaacattttgggaggccgaggcgggtggatcacccgaggtcacgaggttgggaccagcctggccaacatggtgaaactctgtctctactaaaaatacaaaaattggccaggcatggtgtcgcacacctgtagtcccagctcctcgggaggctgaggcaggagaatagcttgaacttgggaggcggaggttgcagggagccgagatcgcaccactgcactccagcctgggtgacagagcgagactccatctcaaaaaaaaaaatttttttttaaagtaaatccctcttatcccacccagaagtgtgtcccttaacactttgggaaacatctttatagaaaaatgcagggccagcttcatgcacgtggacctgggcaatgctgggctctgtgctcagaggcgccccgagctgggtttaatgttctgctatcaccatcttgaaattttccattttattttattttatgttagaaatggggtctcacgatgttgcccaggctggactcctcaaactcctggactccagcctcagcctcctgagtagctggagccgggactacaggaacacatcactgtgctcagctcctcaaattcttaatcacttttgaacaagggaacctacattttcattttgcacttggcccccaaaattatatagctagtactggatacgagtttttaacatcaaaattgagattatatggtgtttgtactattttaacaagtttatttaagataaaccccttcgagtaacatataaatggttttcaaaaaatcgaatggtataagaagtctacgagactgtaagcacccagtgcctgaggactgccccttgtggctcctggctcagcaactggcacaaggcaggtgaaatggtcaaacaagtgaatgaacaggtcctagaatgctggaggggcctgtgagattagctaagccccatgtttcctaactgtgttccaagaacccatgccgggaggggatgggggcagggcaggagctgggggtgctggaggggttgtggggagagaaggtgccaatctctcctactgcaatcggagaagctttgtttttatctattctatatagtggagtctcaagcaagatttgatcgggtgaaagagttccaccgcaaatgaacaaccacagcaatccggcccatcatttgcttttgtaaataaagattttttggaacacagccacacccattcatgtgcagattgtctctagctggtttgctgtgaagcagcagaggcgagaagttgccacagagatttcctggctgaagtatttattatcttactctacagaacaagctcattgacccctgatctagtcaaattcttccattttataggcaagtaaagtgaggcctagacacgtggtcaaggtcataagttaagacaacagggaacagggaataaaactccagtccagggaattcttgtgcatggagaattgcaacagccacccccaaccccacagctcgcctccaggaaacagcaaacctgaagacctagtttctaccttttccagaaaagtctgcagagggagaatgttggggtatggctcagtacctccttctccctgcaattcttcaactttggctcattgcatcctctctgctgaccacggacaggacagagtgccgtcttccatggctttgaggacagtacagaaaagaaagtggagagagacagagcaatttgtaaacaatcagccagccacctccctctccccaccctcttctcttttacatggaagcatccccagtctcttgggcttggaaattggatctgccaggagccccgcggtaagcccaggtgagcagggctcaggcaccatcaataatgagcagagaacaggtttgctgatgatggagagaccttcagaggaacgaaacaaccacagcaaccaggaacccaggcatgcccagagatactgatgaccagactaagtggagtggacatgtcattaacaccagcccagcaaaataattacatgcaaagggagcctgtcagcaaaaaggaaaaacagatcagagccttgcagtgatccagtggtgtaagaagtccgcaagactgtaagcacccagtgcctgggggctgcccctcgtggctcctggctcagcatctggcacaaggcaggtgaaatggtcaaacaagtgaatgaagaacagatcttagaatgctggaggggcctgtgaggttagctaagccccatggttttctaactctgttccaagaacccatgcctggagaggttggggtagggcaggagctgggggtgctggaggggttgtggggacagaaggtgccaatctcccgcactgcaatcagagaagtgtgcatttaaggagaggtgtggatttccaaagtctgcaggtgtctgtgcacacagacctgggaagatccaagagaaacgataggatgtgctgaggattctaccccagtgagcgagcacatagccccacttggggacagagaatgcttgctattcattctgaagggccatcctgagcctgaaacccggacctcctctgagtttgtcctagacaacgatgccctagcgaggcccaatagtattagagaaagactatgggcttgagggtggacaggcctgtgtggttttggaccagtcgctaaacctctctgagcatctgtgttctcatctataggatgtatttacctcaaagtgttgtgcgagcaagtaattgtcttgggcattggctgaaaggagtgaaaagcttcagctcaggttgaaagggggaatctccatccagcaatactcattatataaccttttttataacctgctctgagggagctcatcttcccattgtccatccattgctggagtttgctttcttccattgccagttcagcttgccacctacagggacattttctgcatcaaagacgagacacacctggccctgtcagtgtcacgcccagaggagcaggaaagacacccttctgtgtccccacttacttcctcacctagagtctgcagtgggcctgggggagggtccctccctctctctcatgctattgccctctcccgaaatgccgttccctccttctctctctgaccaaaaacataagaacccagcatatgtaccacttgctctggtgaagccttctccacggtctgccatcccaaaaggtggacaggattcctcagcctcctcccacttgctgcaagctggctgtatgcattagagtgatgggagcaagaatgcaatctctgtgagggcaaagactattgtccactcatcattattagcccagcacccagcacagccctaacacatgaccaatacccagtaaatatttgtggcatgcatgtatgcatggatggatgaatgtgcagatgggcggatggagggatgtgcagatgggaacttagatggatgggtgcatggatggatgagtagatgggaagttggatgggtaggtggatgggtggatgaatggatggatggatggatagatggatggatggaaggaaggaaggaaggatggatggatggatggatggatggatggatggatggatatgcaaatgggaagttagatgatggatggataaatggatggatagatgggtgggtgggtggatacatgagtggctggatgggtgggtgacagcacccacttgagacagctaattcctggctttggcagcttagtgtcagcaaatgggaacagataattccagcccaaggaggccctgagaacatgtggggacctctccctcaacagcatctctgtttccatgcagtgtttcccacttcagccctggagaccatggaaattgacttgacaacagcccagagggagtttctgtcttcaggctgcagctttcagaatcattctcccatcatcagagcctgcaaataaaatagtaactatgcctggcaacctcagaggatcaaaggcagcaagagaaaagcacaatcaaattaccctggatggcagcagctccaggaagaaacatgtctcgagaaactgaaagcagaaagcctggagcagggttccccaccccttctctcccaccagttgctcaagatttagagcaggccgggcgcggtggctcacgcctgtaatcccagcactttgggaggccgaggcgggcggatcacgaggtcaggagattgagaccatcccggctaaaacggtgaaaccccgtctctactaaaaatacaaaaaattagccaggcgtagtggcaggcgcctgtagtcccagctacttgggaggctgaggcaggagaatggcgtgaacccgggaggcggagcttgcagtgagccgagatcccgccactgcactccagcctgggcgacagagcgagactccgtctcaaaaaaaaaaaaaaaaaaaaaaaaagatttagagcaaagtttgcaaagtacctgggtaaggaaggagaagccagcacacaacagttttgtttggcctatatcatgctttttgattttaaaatttggattctaacatttaaaaatcaagctttcacataaaaatctctatgtctggctcctctagagaaaccgggtactctgcagtctccctcttccatgtggcagcagtccccagagtgagtagttgctgccctgctgcatgaaggcattctccaggtgagcccaggcccacccacctgtacctgccaggcccctgaacgtgggtgaatgtgccacacttctgttcgtggaggatcctgactcccccaaagtgcacttgaatgtccttggttaggagcactcttcctggtcttccacaggatggagccaacatgattgtctctctttcgtccctctcattcatctttatttcccaggatcccccaggccagtctgtcatctcttggactcatctgtctaaaggaaagaggccagtgggggcaactgaggctcatctctggccggttctcagctttcaaaatctgctgttgttgagtcaagggttatatggggccgagttgtgcctctctcaagtttaaggaacaaaagggaaacatgacaagggcttcacccagccactgcctactccagaaggagtatcaggatcccctgttgttcccccaacacttgggctctgtattagtcagggttctccagagaaacagaaccaataggatagatggatgaatagatagatagatgatagatagatagatagatagatagagagatagattagatatagatagataggtaatagatatagatagatagataatagataggcagatagagataggcagacagataatagataagtagatggatggatggatagatagatagatagatagatgtagatagataatagaaaggcagatagacaagtagatagatagatggtagacagacagacagccatataggcagacagacaggcaggtaaatgatagatacatagatagatagacagatagatgataatagataggcagatagagagatagacacacagatagatgatagatagatgataggcagatagacagacaaggggatagataggcagacaggcaggcagacaggcagatgatagattagatagatagatagatagatagatagatagatagatagatagacttcttatggaaattggctcatgcaattatggaggccaagagttccatgatctgccatctgcaagccccagaaccaggaaagccagtggtgtgacttagtccaggtccaaaggcccaagaaccaatggtggcactggtgtaagtcctggagtccaaaggcccaagaaccaaaagtgccgatgtccaaggtcagggaaaaaatcgatgtcccatctcagggacagagagagagagtccgcccttccatttcctttttgttccatccgggcccgcagcagattggatgatgcccatccacactggtgggggccgaactgcttcctccagcccactgaccaccctcacagacgcacccggaaaggcatgctttccctgctgggcactcctcagccaggccaaactgacacgtaaaataaaccatcgccagctgccttccctgcaactcaagctggagatcccccacctctgggttctgttcttggaccgctgtttgcctggaggagggagatagagcgagaagagagaaaatggcaggctccatacctgtttgcacttggataatgcagtgggctgtgtgtgcagggaggagtgccagccagggctgtttgttctaggaatggttaatccctgttcaaatttatatcctgaatctttaatgcaactatgtcaatgaagagtcggcagcattgctcggcaccgctggctctgacttgcagagtacttaactcaagcgtgaggagttccgaaggtcctcgaacacattgggatcccaccctcctcccatacacactcacacatccaggaaccctggaaggctggcctgggggagagagacagatcagagcaatgcagggccggattttgtaagtggtgatgctgaccggcatctgcctcctgttcactgtgtagagaaatcacactacgtggctccgtgtagggaccttgcttggtttcagtttgcaagtatttatttaaaaaataagttctggtgttggccaggagttgaataatctcaagaagccgactgagagcagtacagactgtgtaaccagctacacactaactgtaggggggtgtggcagcctgagctctgggcagaggcaggagagccaggagaagctagcagccaagggctcctgggcaggactgtcccctctaactggagaggaacctctacagggccccgcagtatgcactggtgaaggttccatggccaggtctccagtgaaacggccctgatttggagcgtgtgccgattcccaggtgtaaacggtcccctggggctcatttccagctgtcaaggtgaggtcacacacctgtgcaggacacctgcagcacaccaccaaaccagcaagcttttatgttactctgaagttttattctcttttctgctgagccgcaagcagaagaaatagaaaacttggaaggaaaagcagggtccttcaccagaggaacaagaagcaaacagcaaaaacctttgcctgcaagtgaaagggccagagggctggccagaggccacctgcagggacaaaaccacctgggagccccagacatccccactcaagtccaggctggccccagccaggggcagcagggctgggggtgctgaccaaggtcacagctcaggtgggagtgggtccatggcacagggagccattcctaagggaagatcccaaagctggtgtcttcacagaagaatggtgggagctgtttcctcatctgtaaaatggggtgatagcacatccccttcagaaggctgtcgtgagaattaaacgagcaggtgacttgaagtgcttggcaggatgcctggcgcatactatgagctcatgcaacagggacccagtggtacagatgccagcggtgtgtggtgggaaggccagcttgggagtaactagaagtggacgggacctgtctataccatgggcccggggaggggaggcacacaccacagctgtgggcatctgctcggtggctgaagagttgatcttcagcaaggacagggaggaaatcaggggatctttgcggagctgggagcatggcctgagacttggaggacaggaggactgagacctgcaaacccacagcagcggatgggaagggatctccagaaaaacaaaacgcggagatgggcgtgctggactctttctcactcactgcttctccatagggtgcactggactctttctcacccactgcttctccgtagggtgctctgaggcagtgatagctgcggttcatgaagtcttgaccacttactgggccagtgtttcccagacgcattccctggaagacagcagccgttaggtcaataggtgtcaccaaaacaggttccacgactaacgccagcctgcctcctgccacagcttccctgagagcgtccccagcccttctgagcctcagccgagtgaccagggctgccgaattaacgggtgctagtgaacaaatgcccttctcagatctcacgcttacattttaagctgggtctcagtgggcttgcccaaaggaataaagaattggcaattttgggcaggctgaatctctgtggcagggacctattaaggtggagtctttccagtctcttcaaattataacaccctagtaagaggtcatgtcgcccatgcaggaaacgtgtgccctctctctctctccctcccctgtcttcctctcttcctctttcacactccctctctttctctctctcccgtcttctctctcatccttacctccctccctctgtcccttctcctcctctcctttcctttccccatgttctggaactgaggaatccctagagccaagcagtccctgactgacagctgacttggtgatgcaggtggagactgcagcagggggggctggatgcggtgctgggggcaatgggcctgctgggtgcgttgggcgggatgatgcccaggttggcaggatcaccgtgaacctggatgagtggatccctgggcgcccacttctccgagggagggctggacgcctcctcctgtctgaggtcagggcagcagtcttcccagccccaggattctcaagcccatggtggcctctcctggtctgattctcacctcgcctactcactgtgggccccaggcagaggcccagggagaatttcttctcacctctgacgcagaccccgaaggactgaggacagcacccccactgcgtcatctgatgacgcagggagggagggcttcccccagcccacccccggctgcagccgaccctctagagcctgccccagcctgccaggctccatcccctgagaccagccttcagcaagcgtgggacggctcagcccaggcacctcgtcagcatgactcagtgctaaatgatcagatgaaatgggccttcccaaggcccagctggaggtgatgagcttcagcaaggaatttgttttacctcaaactgggatgtttaaccccaggacaggaaaaaaaaaaaaagaaagaaatccctgctcactgccttccctggtgatttccctgtgtgtgtggaggggctgagttgctgggctgtttgcagggacagttggatggagctagattccgtggcgggaaatggtatctcttgtagccacttaagacagggtgagccctgagcaaggcagaggctggggtcttcccctgtgtggaggctcccggcatctgacgcctctgatgtcaggaagggagcccggcccaccacagcgggacccaaacctccatcacgtgccctgtggaggcactgagtgcaagtcggttctggctgggacgagtgaaggtggaatgatgccctggtgagatgcgagctgagccccggctgcaccccttagcagctgtatgactgacagaaggttccccgatctccccagcctggggttcctcattgcaaaacagggtcccagactcccaggtctgttgcgagggcttctctcggcacagagcctggcacatgccgggtgcttgtagggggcctcaaatggagtcaagagatggagaaagacggctggactccggggcaagccaaggtcaaggggtcaggagtttctcctgaggctaaaggggaccctaacagggcacagggagatagagatgtctgctgagctggggacaggaccgggcaccctctcaggggccctctcaggggcctggggagacagacggcctcggccttggggctgacagggctgacacggcagaacacagcctgcgcctccctggacccacctcaagtgctggccctcatatctgaggctccttcttctttgcacgtggtctctcactcaggatgcctgagggctggagcaggtaaccccaaggtgaccctggggtctggcgatgtgggtcctggtcccacctctgcctcttccttgcagtgagatcttgggcacaagacaaccccagaatggaatgggtctaggagcgagaatggggtgggacgggcatcttccaggggagctccaacctgggcagccccacccaacatgccccaatccccaggattcagggccttccctccctgcaaacatcattctcctcgcaggctcacaggctcgttacaggctaatcccaacccagcctcagggcctcaagggcaaagggagggcagacaggctcctgctccagtcctggctcctgtgtgacctcaggcaagtcacataacctctctgagcctccaggtcctacctcaaggaaagggaataatgagctcttccatccaaggctgctgtggcaatgaaatgtcacatgtcatgtagttttaaataaggtcatgtgtataaaatgtgcgggtgctaggagccacccagcacatgctggttcctttcctgtccctggacctaactctgatcccagactgctgagttcttggagaacgttattccctgggttgcaagccacctgcccatcccaggcctgtccaaggtcccccagggctttgttctaccaggcgactgaaggcattccccttcctgcccccatctgcctgttcccaggccctccagatgaggccgctgtctgccctcaacccgcccacagcagcccggcccctcctagcccgcgtttgcagggcttggtcagccgctgtgtctgagcctgctggaatctcagatccctctccccttatcccatgtgactcagtctccttccacccatggaatctcctcctatctctccctgtgtctatcctcaccccctgccttgtgtagggtgggagactggagtcctgcccactgcttcagacctctcgtcctggaaggcagccctctggctgggccctgccacctggggccacatcggattttgctgcatctccagggaccaccctgcccccctcacttcccttttcctcttcccaccaggatgccctgatccccctgcccaacccagagtctgggctgtccccagccagtcccagctacgggttcccagtctccactctccccaacccctctccagcaaaggccagctctgcgcttctcctcgctagagccttgcccttcaggccctcttctggccgagattcacccagcctccacccctcacctgggtgaatggcacctctggcctcacagtttgggtgtcagattctggagtcaggtgcacagatctcaaagcctgcctctgggccactgatgtgctgagtgatcttgggcgggtccaccctcccttgcagaccttcagtttccagatctgataaagcagcagtgattatgcagctgagtcgaacaattagagtttgaattgcaagagttcccttatgctgggattttctgcctctgtcacccctgagacagcaagaccaactcctcctcctcctcctcctcttcctcctccttctcctcctcggtctcctcaatgtgaagacaaggagaatgaagacctttatgatgatccacttccacttaatgaatactagactttctcttccttatgattttcttttcttttcttttttgtgatggagtctcactctatcacccaggctggagtacagtggcgtgatcttggctcactgcaacctctgcctcccgggttcaagcaattctcctgcctcagtctcccagatagctgggattacagggtcccgccaccacacccagctaatttttgtatttttagtagagatggggtttcaccatgttgccccagctggtcttgaactcctgacctcaggtgatcccccacccccagcctcccaaagtgctggcattacaggtgtgagccaccgcgcccagcctccttatgattttcttaataccattttcttttctgtagcttattttattgtaagattgcagcatatcatacatataacatccaaaatatgtgtattagctcttggtgctatcagtaaggcttctggtcaaaaggaggctcttagcacttacattttgaggagtcaaaagttatacccagattttcggctgtgtggagtcagcactctaatccccacattgtccaagagtcaactgcacaacctcacagagctgtcgtgggactgaacaggacaccatacatcaagggccttgcacacagtgagttcaatccactgaggttgggcatgataacccccagggtggcagacacagccccgatacacaaatcctgtttggggccctgccacctttttcccgagacaccagctgttgggcgtcctctgcttctgacgggccccgttgcattctggcttgacaaatgccagcttttgccgaatctcccgctctgggacgggggacatcacagttgagcagttggaacagagaagagtgtttgaaagggcatgcggtatctgggccatggaggaggaaatggggcattggtgggtgggatggcagggctgccagcatctgacccaggaggctgggaggaggctgctgtgtgaatacacgctcggcctctcacagtggctgccgccgcattagccccttgtgcttcagggaacagagcatccgtgatggatgagactttaattaaagtaatgagacatttataatcgcggttatctccaaaattaggccttttagcaattattcctggggaatattcctccggtagatagctccctttttagaacaacgtcggggggtggtctgtacctgagagagattttcccagcaggccctgggctgtgacaggtcaacgatgaggtttccctggaaaacaggacgtggcttctgcctcaggtttctctccagaggagcaaaagttcgatgaccctgggcacctagtcaggtcataggacacttctagtgccctcagagagggtgcctttgggctcagaacctgaagatctgggttcaagtcctgactttacaaccttgctgttgctgagactgtttgccaagtgggatgtgatggttgatactgagtgtcagcttgattggactgaaggatgcaaagtattagtcctgggtgtgtctggcagggtgttgccaaaagagattaacatttgagtcagtgggctgcaaaaggcagacccaccctcaatctggtgggcgccatctcatcagcttccagcgaatataaagcaggcagaaaaacgtgaaaaagcgagaccggcctagcctcccagtctacatctttctcccgtgctggatgcttcctgtccgtgaacatcagactccaagttcttcagttttgagactcagactggttttccttgttcttcaaacttgcagacagcccattgtgggactttgtgattgtgtcagtgaatatttaataaattcccctttatatctatctatctatcctattggctctgtccctctagggaaccctcactaatacacgggatgaaaagcacacgggctgagaggcgccaaagccataaggtctgtgaaagtactttgtaaggtctcaggcatcaggccccaatatgtgaccatcatgtgttcctaacagcagattccagaacattcctctttaaactccaggacagtcccttccctagggtagggctttgcccccagaactactcattgtctgggtttccaacactgttcatggccattgattaaaaaaaaaaaacaaccctctccctctccctctccctctccctctccccctccccctccccctccccctccccttccctctccctccacggtctccctctgatgccgagccaaagctggacggtactgctgccatctcggctcactgcaacctccctgcctgattctcctgcctcggcctgccgagtgcctgcgattgcaggcgcgcgccgccacgcctgactggttttcgtttttttttttggtggagacggggtttcgctgtgttggccgggctggtctccagctcctaaccgcgagtgatccgccagcctcggcctcccgaggtgccgggattgcagacggagtctcgttcactcagtgctcaatggtgcccaggctggagtgcagtggcgtgatctcggctcgcaacaaccacctcccagccgcctgccttggcctcccaaagagccgagattgcagcctctgcccggccgccaccccgtctgggaagtgaggagcgtctctgcctggccccccatcgtctgggatatgaggagcctctctgcctggctgcccagtctggaaagtgaggagcgtctctgcccggccgccatcccatctaggaagtgaggagcgtctctgcccggccgcccatcgtctgagatgtggggagcacctctgccccgccgccccgtctgggatgtgaggagcgcctctgctgggccgcaaccctgtctgggaggtgaggagcgtctctgcccggccaccccgtctgagaagtgaggaaaccctctgcctggcaaccgccccgtctgagaagtgaggagcccctccgtccggcaaccaccccgtctgggaagtgaggagcgtctccgtccggcagccgccccgtccgggagggaggtggggggtcagccccccgcccggccagccgccccgtccgggaggtgaggggcgcctctgcccggccgcccctactgggaagtgaggagcccctctgcccggccagccgccccgtccaggagggaggtgggggggtcagccccccgcccggccagccgcccagtccgggaggtgaggggcgcctctgcccggccgcccctactgggaagtgaggagcccctctgcccggccagccgccccgcccgggagggaggtgggggggtcagccccccgcctggccagccgccccgtccgggagggaggtgggggggtcagccccccgcccggccagccgccccgtccgggaggggggagggggggtcagccccctgcccggccagccgccccgtccgggagggaggtggggggatcagccccctgcctggccagccgccccgtccgggaggtgaggggcgcctctgcccggccgcccctactgggaagtgaggagcccctctgcctggccagccgccccgtccgggaggatggtgggggggtcagccccccgcccggccagccgccccatccgggaggtgaggggcgcttctgcccggccgcccctactgggaagtgaggagcccctctgcccggccacgaccccgtctgggaggtgtgcccagcggctcattggggatgggccatgatgacaatggcggttttgtggaatagaaaggcgggaagggtggggaaaaaattgagaaatcagatggttgccgggtctgtgtggatagaagtagacatgggagacttttcattttgttctgtactaagaaaaattcttctgccttgggatcctgttgatctgtgaccttatccccaaccctgtgctctctgaaacatgtgctgtgtccactcagggttaaatggattaagggcggtgcaagatgtgctttgttaaacagatgcttgaaggcagcatgctcgttaagagtcatcaccactccctaatctcaagttcccagggacacaaacactgcggaaggccgcagggtcctctgcctaggaaaaccagagacctttgttcacttgtttatctgctgaccttccctccactattgtcctatgaccctgccaaatccccctctgcgagaaacacccaagaatgatcaataaaaaaaaaaataaaaaaaaaaacaaccaatcaacaaacaacctcataagcccagcagaccgtgaaggccccaggaactcagggcagaagttagcaatgtgggttctgccctcgttggccagaaaggtgcggtgtggccatttcacttccctcgctgggccttggatttccttaccagaaacatgatggtcatagtcactggccagttgactgcccagaggtggcacaaggatgaaatgcaattggactcagagaaccgtaccatgagcctaaagcatctcatcattcaaccccacaaatctcaggacaaagtcagtgctccacggcgtccatccccggctcctccctccctaactggcagagaccagagggacacacacgtgcctcaagttcacacagcaacatggaacacccaggcctctcgttttctgaagcttttccacccctccaaacctttgctataattatcaccactgcaacttttaactaaaactgattaaaagtttaccacgtgccagacactattttaagcatttctcctgcatcatcgcatcaaatcctcatagtaactctgtgagagttgttattgttgttgtttctgtttcacagacacagaggagttgagagatttccccgaggtcacacggcgacgtggacccaggtgtacgtcccttgcaaagctcgtgctctaaccatgacaccacactgcctctggccctgatgactcttgcagacactctgacggtttggtcccagttcctggttggagggggacccctgataaacaggggtcactgctgatctggcctttctggaattctgcagggtctgccctcacttccctgccactcaccctcaccccacccccagcctctctgctgtttgctgctgtaccgcacagcctgttcaccccaggatctgccccttcctcttccagggttccagggcttcccagaagtcaggcttccattcccgcaggaagggtgcaaacaggccagttcctgctgtggggaggagtgggtgccacagtccctcagatcactaatctattcgatcctactgtgtgccaagtgctgctctaggtgcagatgaacaagccaggtggggcctgcccttggggagcctgaggccaatgtgcccgaagggtgcccagtgccctacagcccgagacagaccctggctgcatgaggctgcccagcactgcaccccaggagacaggacagcaggagagcaggagttggacgcccgcctgcccatccagcagcaacaggcactgggaaagggtgaggccctggggagaaagaaggcaagggagccgggcaagcagcaggcaggagaatcacagagcagctgtgcccaggagccctggcatgggggccatggccaagcagctgtggctgcttcctctgtgtctgtctttgtggccctggccgggatggcgctggaccccaagaggctgcctaagccagtgggcatggcctccttaggcagcctgggtgatgaaacggaccagacccctgggtgtgggcatcactcttgctctgccaggaagaggcagaaggaccaatggcagcggcaggggtggattcttgcccagcaacagctgccaagactctgggtcccggaagcagcccctccctgcctcctttcagtgccctggctttgcaatgcagggatttgccagcctgagctctgccagcctgggttcagcaaatcccgcaagaagagccggctccccacgggattgccagtggaccagtgagatgcctccttaccagtgcccacagcgggaggggtgtgaaatcgggactggctccctgagagctgttagaggccaccctaactgcccatgggtattcggctgaaattcagctcctctgggagaaaaatctggaacagagaaggaggctttaatctgtccgcaggcacttcaaggggagaggaaggattcctttagaagggggcaggggttgctggaaaacaaggctgtggttttagaggagggcagttagggtggccccttcctgggggtctgggcttggggccctgcctgcagatgagggggatccgcctggggcaaggtcttgagagaagccccatagatggccccgtcatgtggagtcagcggctgtggttcgggggaaacagggaggccaccgcctgctttcccgggcaccgtgtggctgacccaccgcagttggaggtcttggctctcagggagcttgtcccgatttcccacccctcccgcttaagggaactatgggccgcctggccctgtgctgcccgcctgcactggtgcatcttcagctgatgagaggatgtgaggtctggagtgaggccagcatggcttcgcctgccaggagccttcctctgctcgctcctctcccccagccccgggacaggtccccatgtcccaggcacagtgacactctctggcatggagccaaggcagaacttgcagcagcctgggaaggtggatcctggggccacagatctggatgaagaactttcctcccggaaggcaaaggcaggcaccgctgcttgccccagacggtgggggtgctgaggccttggcgccacgcctctgtggggtgagggccatcttgagccagagcctagagtgcattccagaacctgatcttatcactccaccaaggacgctagtattctgggggattgatttgctgcaaccagtgatggatttaaaacacatgaggaagccaattcattccttcaccctgggcctgcagaaccatccgagctgcactggggcagttctgtacatctccagtgaatccagccctgcacccctctgttaacgtgcttttcaaaccaaacagtggaatgcattggtcatcacagggtttgatctgatgtgaaaagtgttataaagccattccaattaaagtgcctctggccttgtgtttcctgaaagctgctattgagaggaatataattgcatgagaacagcatcccctgaacttgctgcttcttggggaccccaccacatggcttgggtcaaacagcacactgacaggataccctgggccacaggaggcagcctcccacccacacttctcttcctaatctccaagtagccactcccctgggtctgcctttgtccccaaactgcccgatccccagtgtccccatcggtgggtcagcatttacagggcaccatccttgtccccatgatacaactctcaccccacaggagcagggtgctggtggcccagatttcacagagggcttggtgggtttccaatcttcgtctgtgagtctcgagtccctgaggacaacgccccgcttctgtgtgtctctccggacttgtgcgggggtactcagcagactcttgggtgatccacctaaggtgcagtgccctgcaagagctggacaccttgaaaatagaaagggggttcactccacgcgaattataatcctgggagaaaggtgcttggcctggcagtagcagggggcaaagaaaacacagtggagggagaagtaagagaatggccactcctgcccctccaactccagcagtgcccccccgactccagcagcccccaccactccagcaggccctccccactccagcaggcccccccactccagcaggccctcccaactccagcagtgcccccccccgactccagcagcccccaccactccagcaggccccccctactccagtaggtgcccctcactacaacaggccccccccactccagcaggccctccccactccagcaggccctccccactccagcagccccccccactccagcaggccccccctactccagcagtcccccccactccagcaggccctccccactccagcaggcccccccaatccagcaggccctccccactccagcaggcccccccactccagcaggccccccccactccagcaggcccccctactccagcaggcccccccactccagcaggcccccccactccagcaggccccccccactccagcaggcctccccctattccagcaggcccccccccactccagtaagtgcccctcactccagcaggccctctccactccttctctccctcccttcccttcccattctgggccctcgccttcattccccttttctcttcgccctttctttcccctcctctctcctcctcagagttagaaagaccttggtggtgggtcccggtaggaggagaggacgcttgctccccacttcttggagagcgagcctttgcttggcaggggtctcagagagcaccccgagctgctcacaccccccgttgctcaccaccaaccccttcaacgtccagggtcctgcagaactctcaaatccagccaggtgggtgtggctcaggcctccggctacctgtgctggggtagggaacagggaagggggcacagcctctcttttattgttgtttggttctggccctgccacagaaagcattttgcaactggaccctccacccacctcccctgaccccctagtgcctggcagatgcttcctagcgcagggggagggagggaaggagcggaacagacggcccccccaggggtctcacctgccatcagccttccagtctccctcatccccgcttgctgacctccctcctggcccccaggggacccacgaggcacaccctgcatggactgatgccacccaagccctggctccttgcccccagccgacgctccacagagctctctgcctcgctaacttggaacagtcatagcatgagtgggtttttttctcttttagtcaaaatcaatgacaatgacagagtaataaggcgagccgtggggaagaagaagaaagcgcctggtgtcaggattgatgcaggaggcagttagagggacctattaggatttcagttgcctcagggtgtgcttctccggcgagcaggtgtgatgtcagggaacccactggcaggcaggcagccttgtccctgcacacctgtcattaatgtggaaggcgcaacattgcagctattagtagggggtggcggggtgcgtggtggagacatctcagttatacaagggggactaagagttccactgggagaagagaaggaggaacccgaggtgtctgccccgactccagggccccgagtctggagagaagggacctcggagggggcgttcaccacagcgcagtggacagggcctgaccgtcacaggtagggggtgcctggagcctgccagccggaggagtggggacccctttgttttcctcccaaagtccactgttcctgctggctccagaacagcccccaggcattgccacgctccctccctgggccacactggctccccgcacctcaaaagggagaaagacccacagggctgggggagacggcagatcccccaccatgcactcacatagctggggttcttgtcactttgccaggtccctttcaatttccactctgaaagaagggctggcacatgacagcgttaacctctggcctccattctctgccccccagagaatgaaacaaagggagaaaggggatctccccagggataaggcaggctcaggtcagaggccctcattgcccagtcatcttgggcagctccctagctctgcccctgggtttcctgtctgtaaaacagggtgctaatacctgcttgcttggggtcattagaagttggatgcaggacgggctacctaatctgtggagcccagtgcacatgacaaggggagaccttgttaataaagtactaagaatttcagatccaggtgcagtggctcacggctataatcccagcactttgggagaccaagacaggaggatcacctgaggtcaggagttcaagaccagcctggccgacatgttgaaaccccatctttaaaaaaatacaaaaataagccaggcatgataatgggtgcctgtaatcccaactactcaggtggctgaggcaggagaatcgcttgaaccagggaggcggaggttacggtgagccaagattgcaccattgcactccagcctgggcaacagaaggagactctgtctcaaacaaaaaaacaaaaaaacaaaaaaattaaaaaaaaagaaaaacttccggacagcagtcgttcttgctaagaatttctagagtaggaagcaagggtcttgctccctgcccactgtgcaaatgaaagaatcaagtacaaggagtgagaaagacagcctaatgtttcctggacatggtggctggggactggctggaagttggggaggggaccccccccagcctaggtaggcccaggttcctgcagccacagccttgatggtgatggtccagggagaatggctgagggtgcccacctggcaggaccacaactgtgatgagtgaaatcagcacgagaaggactctggcacccagtttgggggtgggcaggcaggatgaggcagtgatggacacgcgcagcccccaccacacctgccttcatcaggggcctccgggtgcccggacggatgctggtgaccatggcaagggagggctcaacggtgctgccacagcggtggtgcctctcgagaggcagctggttagaagtgagaacgcagtgtcttccgcctctccacaccttctcaaggaggtgatttcccagccacccgcgagcagccgagcatcctcattcagctcctcaggtgtcagggcactgctcttgtttacactgtcatcgcccttgcactgaacagcagaggcgtggactccttttggctgatctttgctctgagcacccagcgctatgccaaggatggggagccccatccagagcccaggcaccatctccaagcagatggaggagctaggaacagctaggagggtctgttaccaaaacaaaactggctccactcacccaggttggtaaagccaaatacccacactgaggtttgcagcaggagaaaggagggcgtttatttgccaggtgccaagcaaggagaatcaggcagctcacacttaagacccaacatcctcaatggctcacgagcaacggttttgttttttcttgttggtggtttcttttcttgttgtgtctcactctgtcacccaggctggagttcagtggtgagatcacggtgcactgcaacttctgcctcttgggttaaagcaattctcctgcctcagcctcctaagtagctcagactacaggcatgcaccaccatgcctagctaatttttgtattttttatagagttggggtttggccttgttggccaggctgatctcaaactcctgacctcagttgatccgcccacctgggcttcccagagtgctgggattacaggcatgagccaccacacccggccacaagcaagggttttcaaaggcgggagtatatttcaggaaagcagaagtttcaggcaaaatcgttaatcagtacatgaacattatacattggtttggcctcaaaaggtgggatatcttgaagtgagggggcttacaggaccagacgggcagagaaaagtctcatccgtcccccaacccccatcctcagaactggcctggcttgcaaggaggggattttgtctccatttcacagatattaaggaaattgggtgcagaaactttcaagagcctgcccaggattcacagagtgagaagccagggcaaagccagaatttagacctagtgctgtgtggactcacccttcccacaggaacatcctgcttcagaactgaacacctgcaactcagcgtggctcactcgatcccagctctagggggtgacccggccacccacaccactctctccccaccccacaccatgggttctgggctgcctcaccctccctcattgcctcctgcgtgcacagaacatcctttccatgggggacatgcatcaggagtagagaaggctgggcagggacatggtgtgggatcgcatgcggctgatattcctgttaaataaatacattttgctaattggattactcagacagtataatatactactggatttccaacatgatgctaataaattgtgtgaagaacttaatcatgttagcgtcctgaaagcttataagagatgaaatgagaaaatcaggcaacgttgacacccagggcctcctaaggctctcaggctcctggagcttccgtgagctcccttcgccgggctctctgcaacagaagctgccgctgggcatgtggggtgcgtgtgggggtgtcaaggggagggaagaaggaggtattcagccagagaatgagagtcactgtgccagggactcgaggacctgtccctgggccaggggagagaagctggccgagcaaggttcccagcaggtgaagccaccctggccctcacactcctctcatcagctgaaggcccagcgggtgcaggtgggcagcacagggccaggcggcctgtggttctgtgaacccaaaatatctgagacagtctcagttaatttaggaagtttattttgccaaggttgaggacgtgcgcccatgacacagcctcaggaggtcctgatgacatgtgcccaaggtggtcagggcacagctcggttttatacactttagggagacaagagacatcaatcaacatatgtaagatgaacattggttctgtcccggaaaggcaggacaactggaagcagggagagggcttccgctcataggtagagaggagacaaatggtagcattcttttgagtttctgatgagcctctccaaaggaggcaatgcatgtatctcagagagcaaaggggggactttgaatagaacgggaagcaggtttgccctaagcagttcccagcctgactttccctttagttcagtgattttgaggccccaagatttattttcctttcacagttccctcaagggtctgtgcaaaaagcatcaggaccctacccactccccttgctgccaatgtctttccaaaagtgtttccacccacatctcccttcacacagggaaccactgtgggctgaaggtggccaagaagttgtgggaagcacctgcggttttgaggagggaagggcagggactgagccaggtggccggaagacaaggccaggagagcctccattagtccctgagaactccagagagaggtggcttccctccttgccttccagactggaaatctgggtggttgatgtttaattaacattggtattgacttgaaaagcgaagaccagaatttaagagctcattacccctcttgccttcatatcttggctcctggctacccaggaggggatgagggatgaatgagggtctgtgctgcagaggcaatgagacttgccgtctcaccaagcaagcaagtgcatagcacgggacaggccattagaacaccacgcacatgcacgtatgcacactcacacccaggcacactcacatgcatgcacactcacacgcacacatgcacacacctgaactcagcccccaaacaggagcactcttcaatggccatcattaaaataataactggcttctgcagcagcttcccaggtattaatgcaaatgtttttctaactctccaggttcaagagcaacagcttacacaagtctaattagcataacaaaatccagccaggaagagaaaacaagctcctcttatttgatgcttcctggtaattagcaagaacaattactgcagcatccggaatttccaacccccaaagatgccagggccacacttgagcacatcaggaatcaatttagagaagccaaaataaggccattatgagggatgctcaacccgagcgtgacatgtgtgtttgcaagcaagcaagcaagcacttccccgcccacaccgcccctgtgctgaccgctgcagcctgcctcctgcccttccccgcgtccacacacacacgcccgttcatacgctcctcgcccaggtcttcgcgcatccagcatccattcattcagcaaatgtcagcgactggacctgctgctttgttcagaaggtgcaaaggtgagaaaggcaaggtccttgcacccaaagggtctggttgggtgtgtttaacctgcatttcatgctgccttctgtgtgctgggcccggtggtgcagtgcagagatcagaacaagacagcacccatcaccaagaatgtcacgcccatgaggtattggatgccttctaggtggtgaagcccgtgcctggctcaaagggcacacagaagagagagggcctctctcgtcctggggtgggtgggtcatcagagacttcatgaaccaggtgactgcagagctgggtttgaggatgaaaagaagttggtcatagtgggtggacataggtcagaagaacagaaagagtgcttaggtaggcactgtgggataaagccacaaaggcaagaaaaggagcgggtgctcagggacctcgcagcagagtgcagaggagtgaaggaaggagccacaggagatgggcctgaggaagctggtggctgaaggtcgtagcaggtttcaggggctgggccatggatcgagcaagagggaatcagggttctggtgcggtggctcatgcctgtaatcccagcactttgggaggccgaggcaggaggatcacttgaagtcaggagttcaagaccagcctggcaaacatggtgaaaccccttctctactaaaaatacaaaaattagctgggtgtggtggcacgcacctgtagtcccagctactctggaggctgaggcaggagaatccttgaacctgggaaacggaggttgcagtgagctgagatcgcgccattgcactccagcctcagagtgagagtctgtctcaaaaaaaaaaaaaagagggagtcgggaaaggagagaagactgtatggaagaggcacggtcagtgtcggtggctggagaggatgccactgtcccatccaggtggggtggacagtctcctacccccaggccaagagggtaggcatggatccaaacgggaaatgacagatgctggactccccgggagagaaatcctgactgcctgcatgtcaggcagaagggagagggaggagatgtccagaatgaccacgtggatgtggggaggaggctgggggagctctgcgtcgatgggatgggaccgtcgaggccagctgggaagaggccccactcacatgactcattcatgtgggtcacagccttctgtgtccaacctgtgtcttctgttcagatctgcacccttgttgatacccaactacccaggtggaaacagagccctgtcgtgaccattcacagacgacacaaggcgtggagccccaaataagagactatgtcatgagctgagcacccccacacccatctctgcctcagaaacaggtctcccaggctgaaagggaggaacccttctcttctcctttgtaatggcagcctgagaggtctccgcggcttctctcaagcacccacactgaggctttgctataaaaccttccttccagcctgggcaacataacatgaccccatgtctactaaaaattaaaaaaaaaagaatagctgggcatggtggtgcatgcacctgtagtcccagggtgttgaagtgggaggatcgctggagcccaggagttcaaggctgcggtgagctatcatcatgccactgcactccagcctgggtaacagagtaagaccctgtcttaaaaaaacaacaataacaacaacaaacaaacaaacaaaaatcttccttccttcctggtctacttccctgtgcttctgcttaagctgatcttacctggtgcccagtggaagcaagacaactgggcaccttcttccctctgcagagcccgtgaacaccgtggtgaatctttcgggagctcctttgctcaggtaaccctttccctggacacatgttcctgattcgcaggcaggcctcatcttatctgggccttcagtgaggtgaggcctcactcagcatttcaatctggaacatcgagttgacagagggtaattcacataattaacttccttttcttttttttttttttttttttgagatggagtcttactctgttgttgcccaggctggagtgcagtggctcaatctcggctcactgcaacctctgcctcccgggttcaagcaattctcctgtctcagcctcccaagtagctgggactacagtagcatgccaccgcacctggctaatttttgtatttttggtagagatggggtgtcaccatattggtcaggctggtctcaaactcctgacctcaggtgatctaccagcctcagcttcccaaagtgctgaggttacaggtgtgagccactgtgcctggcccacataattaacttctaaatcaaaagttggaactgaaaatgcagttttccttgtccttcacattccaggttgatttctcccatctcccttccttggagatgtgggaagagagggccgatggtccttctggatgggaagcacagccggtccacactggtgtccttctcagtgcccagcggtggaactcagggtatgctgaatgaatggaggaaggaagccgtcaatcccctacctcctttctctcaccgcagtaatgaagtatgcgctgcactttctcattaggaagcatttctctttccatccccacatttgcatcttccaagcattgtgatgcttttccaatctagaaggaggaagtggaaaccctagtttctgtgggcttcgtcatagtgcctttttcctaatccattggcctctggttactctcctctgagccacgttcctgacgtgcaaaaagctgcaggagccccagggccattccaatgccatttcttgtccaacccgctctccagtccttgcagtgcaaggtggcacctcagggcaagcctcatggggccagagtggggaggctcccagcccactctgctgacccctttgtctccacccggccagcaccttggctgctgcatgaaggtggtaggaatcagggggcaaatgtagagaagcacaaataccaggccatggtgcttgctgcaactggaggtaaaacaacgtgagtcatttaaactgcaggctccaggctggaaggaagtctccagcagtgaaaagagaaaggaagggaaggggagggaagaggagacaggtggctgggcaaaggagacgaggggaggagaattccgggcataggaaacaggatgtacaaaggctccaaaggcaaggagagctcagggaaatgcaggccagccagagcaaggagggggcaggcccaggtgaaggtgtggggtgggcacaggcagcctacaggtgccgaggccacagtgtgctgaagccagctcccacctgcccaagagatctcattactcaatttccggaaatgtgatgaactggctattaaactgggccatttaaaacattaatttatatcaacttacgatcaaataaattttacttgaaacaatggtaataaaaaccccaaagtcctttcctcctaatgattttgctctatttggttattagctgtattctggaggcgagtgacatttcttgtattcgcatggtggaactattatgaaatgagggctacatctctttcccaccatgggttcagagatgtcatgtcgttggtttgaaattggctgcaatatggctgggcacagtggctcacgcctgttatcccagcactttgggaggctgaggcgagcagatcacgaggtcaggagattgagaccatccgggcaaacacggcgaaaccccgtctctactaaaaatacaaaaaattagccgggcatggtggtgggcacctgtaatcccagctattcgggaggctgagggaggagaatcgcttgaacccgggaggcagaggttgcagtgagccgagatcatgccactacactccagcctgggcaacacagccagactctgtctcaaaaaaaaaaaaaaaaaaaaagagcgaaagaaaaaaagaaattggctgcaataggaatagctacaacacagacattggtaaactatacaaatcagtgcttgatttgtatagttttgttgattgtctagacttatgaatgtgatggagaaaatgttaataacacagattcaactaaaacaggttcactgcccttacatggtgaatatcacaaaaaagatagtcaaattacacttgaattgcagccataggctggctacagtcacaagagttcagcaaaaacctgtgaaagcattctgtgtaactggctgtatggaatttacattaaggaatattatatatcttattattatttgtaaattggggccactcgtcctgcgtatcagtaaaacgcatactcaacgtctacacgtttgtttttcaggaagctggctgtccaacactcaccagcacgccgtggcctgaaagctgcattcagtgtgtggacttcatcctgggtgaaggggatatggctttcgctaggattgaaagcacaggctgggtgcagtggctcacgcctgtaatcctagcactttgggaggccaaggcgggctgatcacctgaggccaggagtttgagaccagtctggccaagatggtgaaaccccgtctctactaaaaatacaaaaaattgcagccataaaaaatgatgagttcatgtcctttgtagggacatggatgaaattggaaatcatcattctcagtaaactattgcaaggccaaaaaaaccaaataccgcatgttctcactcatagataggaattgaacaatgagaacacatggacacaggaaggggaacatcacactctggggactgttgtggggtggggggagggggtagggatagcattaggagatatacctaatgctaaatgacgagttaatgggtgcagcacaccagcatggcacacgtatacatatgtaactaaccggcacattgtgcacatgtaccctaaaacttaaagtataataataaaaaaaaaagaaaaaaatacaaaaaattagctgggcgtggtggtgtgcacctgtaatcccagctactcgggaggctgagacaggagaattgcttgaacccgggaggcagaggttgcagtgggccgagatcacgccactgcactccagcctgggtgacagagtgagactctgtctgaaaaaaaagaaaagaaaagaaagcacaaagggatctgtcattggatttgggttttggacactggtgataaggtggggaagagacaggaggccacaagctaggaggcaggggacccgtgaggaggctgtcctgacaccatgcactgacagccgcgatgtgggggggataagtggccctggggtggggagtggggaggatgccaccgagaagtcatgaacaaagccccccacccactctcacggcctgccaggtagaagcctggagctccttacccaggtctcagtgagtgtgaggtcattctcccgggtccgtggctgctcactcgtgctgtgagttgccaagacccggggtgatcttattttggagacatttgccccagcctccaaagcaaggcattccaaagtacaggcttccacgctggacaggtagaccagctgcagtcatctgcccttggttatcctcacatccacggttttcatttgaactgtctttatcaggcacacagaagccgcttctgaattccctcgcagcctccgtgtatcagagacccagtgccagcctgggccgccggggcttgagatgagcgctcttcctccctcccgaccccagcctgatgccccaaagccctccagaggaaatcaaagctggcgagagccacgcggatgttcagaagaagtctcttatcccggcagcctttcacaggctgtggggcctcgtgccctctgccccccgacgccgtgagaggccggcagccaattcgcggcattgtctgaaacccctgcgtggtgccattgccgccgtctttcatcccttttggcaaagaacccgcgccatcgggtcctctgaagtgcgggagacggatcgctgatctgccggggaatgtgctctacaaggttaagcatgtttgcccaagaaatacggataatgctcttagcacgtatgacctttacgatatgtggaacactgtccgtgacaaaaatgccattttttaaatggttttcacgccggggtatccagccattaatcatgctgcatatgagtgactgtaggggctgcctagaaaatcctagagccccacgttagattcctggcgggccaagggctgtgtgtgaaccttgacttcattaggatctgcaccgccgatggcttcctgggctgggtggcccccgggggctcctgcaaaagagcctggcttctcagcaccttcacaggagtggccacgggctccttattttaaggtgtctttgtgtccttggagctgataaataactcattttggatgcctctgctgagcctgcatatttagtgcccacgaactgcatctcagatgctggaggctatgccgcccctctccctccctctcccggctgcagagctgggcattgctcagtaggggaatggctgatgctgggcgccggcctgattggagggaagtgatagaattcaggatttttacttccaaaaaggcattttccagggtcagccagttaatacctgcacagccccagtcagagagcccccagacgcctgtgggtcccaagcacgagaaaatgagtctggtctgtgtcgagaggcactgggtgtgcagaacacacacaggatttcaaaagcttgatataaaaagcacaaactacctcattcataattttcacactgattagatgttgaaatgataatgttttggagatactgggttagatcatatgtattattaaacttaactttaccttttctttttgacttatttcttgtggccactagaaagtttaaaattgccgacgtggcttgcatcttacctctgtcagaagctcaggccacacacccatgcagagacccaccctgggagtggagaagtggatggaaggacagaagagaaggcccttccatgccctgggggcagggtgctcccaatcccattgcggggaaggagtgctcacacaagcacctgtgcaactggcaccttttggggtctgtttgtgttttccaggcctgacactggggcaaggaaaagccaagacacatcgcactttattaatcaacatttagtgatgcttttggagacaggcagagggagcaaggggtgtcctgagtccccctttggaagggaatggggatagggagcaggcagcgggcagtgggcacagacaaccagcagtgcccacccagatgatgcactaatcttccctcccccacctcccctcccccgcagtttgatgcttggctctgtcctggtggacttcttaaacctgcaccaagcggctgctactgctgaccccagggatgtcctgacactttctgggtggcctccaagccacatgcaaatataacccaatttccaccactgtctgaggaaggatgtgggaagtgctggtcccccctgcagccctcaccaatctccccagtgaccacacgggagcatctctccatcacagccactctggacccattgcagacacaggaagagtaacagcatcccagcctggcggcgtcagacggtttggcagagtccctgtgcaccagatccagtgttaggtgctgaggattcacagcaaacgcataacccctggaccagcatgtgaagtgatcatcccaaacccatcatgagagaccaaagggggtcttgggattcctaagggcatttagcccaacctaaggatttgaaaatgtacctgccggacatggagaaactggcaccttgggtgttttaaaggacaaattgtaggtacacaggaaaagagaagtgggaggggcatagaggcaggatattgtagaagtaagtgctgatgaatgtgggagggtcaactgtgggcagtctgtagtgcaggtgacggtggactatacaggctaaggcagggagcggcaggagacaaggccgggagagtcactggggtctggggaaggtcagaaggagccttgaatggcatactcaggattcgatctccctccaataggcaaagggtgccaccaaagggctctgagctgggtgagcggctttgatttagagtttccagaaatggctccggcatcagggcatgaaggaggattaacaccaaaggcacaaagtttgggacctgaactaggacattggtattaggaagagaaaagagacaaatatctaagaaatatttaaaagatgtaactggccagaccaggcatcagagtcaacatggtgggcaaggaagagctgccattgtgtgtctcccggatatgggctctgatctccaggtcagagaaaactgcaggctggcctcagtagatcccagaggcagaagcgacatccaccaagcctgcctcactgggctggagcagcctggcatctgtgcaccagcctcctgctgacctctcaccggctgtcaggacagcccagggcagagaggtgacatccaggctacccgaggcagcaggtcaaacccagctaagtaactaaataaagatatgattgtaatgatgattaaatatgaagcacctcattaatttcatgtgagaggtggggaaaacacaagatagcccttcctcgaaactcattgtttgcctggccctgagacatccccacgcgatgtcttgttgggtctaatttaagtatgtacatttaatggttcagtaagtaaaattgcctttattgtttggaatggtttttgcaataatttatgggcttggctggttcatttgacgggtccctatgatggagtacgtgtcggccctgaagcgggtatttatataaagcactcagggagaattcagccctgcggccctgaacatcatattcccaggcagcaagggagactggtggaggccaccctgacccgggagaggcagctgcatacacccaggaccgctgcagctttgggcaccctggagggttgaggggcaggagcccagtgagcctaaaccctttattctttggttctgaagtgccctggcagtgcaacttggcacacagaaactggaaagaatgagaagcactcggaatgggcaaaaacctagatgttttcccacccacttgccctggccgccaaggcctgagtcatccatcacccactttctgacccagcctgcatcttggtcctcctccttggattctgggaggagaggggaggtttccattgctagccccaaccctggcaaacactccacacccatgcctgctgggggcagctggggacagctgggaatggggaaactcatccacagagaataaagggccagcaagtgatgagtggacatgaccagcaaatgggccaggcccaggaatggatcctgacccagtctgaggaggggccagggccggggcaggggccagctggaggaccagagggagggtccagatgggacccagggtgtccatctcactggggacgaggcaaacgcagctaccatgagaagatggaggtctgggaggcagggccccgaggctcttccacacatgatggatttactaggtggggggatagagtaggttgtagcagaaatttgatcctctttcattttgccctggggtaactggtgaacagtcttgagctcctgccagctggagccaaagagggggagctcagggacggcaggtcgttttatgccgttgatcaattccttgaccctgcccctccattctttttccatctcctccccctgtacttttgagccctcctcactcttgaaaaaaaaaaaaagccagtactggaaattaaaattgggtagacagagaaccatttaccgctttgattacctaacttctttcttgagccgatggtaaactagcccaagtttaaaatatcccacctttgggcctggagctgtggctcccaccttgggaggccaaggcaggcagatcatttgagatcaggagtttgagaccaggctaaccaacgtggtgaaaccccatctctactaaaaatacaaaaattagccgggtgtggtgacccattcctgtaatcccagctactcaggaggctaaggcaggagaatcacttgagcccgggaggtggaggttgcagtgagccgagatcacgccacagcactccagcccaggtgacagagtgagactccatctcaaaaaaaaaaatcaaataaaaaaataaaacatcccacctttaaagggcacagacatttttaatctggtctcaatgatgctgctactggcacacagcaaatgggtggtgcctccagagggaaggacggcaagtgtggtccgggagctgataagatgcctccctccctgcactcagctccggccagcagcctccttattctgggagggggcttctgtggactccactgagccccccacactctgtccatgttcaggttcaccgacagcatcaggttccattcctccctctgcctccccttcctcccctcatgattgaccctgtggtgagagagggtggtgactcaagatgcacaacacctctcgattttccactgagcatgcactgtgtggactatctaaagtcaatgtgtgcttccagaccagcataatcgcacccacggccctccctaccccgcataaaacaggggtactccagggggaagctgcttatctgcgatttggccttggaaaagtgcatttcagagaggaaagcaaaccactgtccaagctgcgtcccatgctcaacagataaacgccccaggcttctatctgatgctgagctgtggatagaggaaggaaactgtcctaaaatgaagcggtctctgtctttgcttctagctcacttctccttgtggggagatgggcccctcaaaacagactgataaccaccaattttgccacaatccactctaacagagacaaggaccttggctatccatcaagggctcactcacttcctggccatggagtccatttgggtggattttctcatctgtgcagcccacagctgggctccccagaaggcagactttgagacgaggagttgactgcaagtcattgaattgggagaggaatccaggagtggggacaggagatgaggacaggaaggcaaccaataaaaatgccttattcatacaattatcaccatgatcgccaggcgctccatcccgcttgggagctccggcagacagcacaagctacggtggtgcaccaatggcctgcgcacacctggctgagggttgctcccaggtactcactcatcagtactgtctcctgcacctccacctggtgggatcctgcttcacggactgagtcccaggtgttctaaataacagaggtgaagatcaatgggacatgaggcattggggtgggggtactagcagggtctgctacaccatttcatagagaggagaggaaaggtcagctgcgatttggccaaggccatgcagctcttcatggccaacaggagactccaactccaaggcccaaaccctcatgactctgtcaaaaggcctccagcctggcaactctcccagttgagccattgtcaatgggttccccacaggacccggggtcccaggttagagggattagcaacactcctgctgtgaacacatccccctccatcacctgaccccgtggagagccacacaggggaaggctccaaccagtgcctcaggcaaaatcgaggaggtggccggaggctgacgttgaaaaccctgtggtctcccagcaaagatccgaagagttgactgagcgaagatctggcaagtgctggtgacgggagaggttggattcttcacacgctgccggtaggaatggaaagtcgtgtagccaaccaaattgtaaaatggaaaatcatttggttgttccccaataagttaaacatagacttgccgtaagatccagcaatttcactcctagaaatataccccgcaaaggccgggcgcggtggctcatgcctgtaatcccagcactgtgggaggccaaggcgggtggatcacgaggtcaggagttcaagaccagcctgggcaagatggtgaaaccccatctctactaaaaatacaaaaattagccaggtgcggtggcaggtgcctgtaatcccagctacttgggaggctgaggcaggagaattgcttgaacctgggggacggaggttgcagtgagccaagatcaagcactgcactccagcctggggacagagtgaggctctgtgtcaaaaataaataaaataaaataacaaacaaacaagaaatatacccccccagaatgaagacaggggttcaaacaaaaacttgtccacagatgtgtgtagcagcaccaaacaacccaaatgtccatcaactgatggacggacaaacaaaatgtggtgtagtcataatacgagcaaacgcaatttcagccataaaaagtcataaagcagcccagcacagcggcaactcctgtaatcccagcactttgggaggccaaggcgggcggatcacttgaggtcaggagttccagaccagcctggccaacatggtgaaaccccgtctctgttaaaactacgaaagttagctgggcatggtggcacgtgcctgtaatccaagctactctggaggtttagacttcagcctgagcgacacagtgagactccatctcaaaaaaaccaaaaaggaatgaaatactgatacatgctataacatgggtaaattctgaagacaccatgctcagtgaaagaagccagacacaaaaggcctcctactgccgattccattcatatgaaacgtccagaataggcaaatccacagacagaaagcagattggtggttgcctagggctgcggaggtggggcggggcggggggtggggggtggtgggaaaaagaaatgaggtgtaattgcttaatgggcacaagtttccttttggggtgatgaaaatgttttggaattaggaatggcagttgcccagcactgtgaatgtactaattgctactgaagtatcactttcaaacggttaaaatgatacattttaggtaatgcatattttgtcataaaaaaaatagccacccatcctctaccccaggagaagggaggagcggtattgagattataaacatttactgcaaataattcaaaaggggcagttaagaaacatgtgagcaatcgggactctttttcatgtcccacatagagcctggggaaaatctgaaccaataacaataaaataataaggcctaacagctgtgggaatacgattgtctcttgggctcacatgtggataatcgagagttaactcttaataaaataataaaacgcaggagcagtgggaataaagattacctccttagccaactgccagagaccatattcagaaaataatgactccctttctactcccctcattttatggtatgagatgtaattgtagccgggctgttcgcaaacttccaggggaaggtaattgtcaatcaaaatgaaaaatgtcataatttaagcgtgtcccagcctgacaagaaggtccatatggtctttcagtgaggcgcgtggagcggtgatttatgactgtcaccagcccagcgctgtctccgagacattcaaggaccgcgtgggctggacactcaccttcggtggcagggccaccgagtcacactccactctcagctgcagagagttcctgaccagatgacgccaacaactgtaaggtccttggtgagtccccacggcgcaggaagaaagatgatataaagagatgattgccacccagaaaacactgggaggagagaaaatgacagagaaagaggacctggccttaaaatggggggtgagggaggggttctgccccacagttgcccacagctttaacctttatagcaaaaaccataaattctggatgtcgcgggggggtcagtcgtatctggttggttgttgcattgctgtgttttttttgtcttacgtttggaggttttgtttgtttcctttctaaggatgcttaagtgggaatgggtattaaggtggccatatattgttgaggttgccctggaaaccagaagataagagatgccctcaaacctgtacccagccagggcctgaggaacctctacactccttttgccagaaggaaatgtcatttcagggaccctccccccacccccagccccacccacataaactaaggcagctttatgggctagaccctgcccctcgacacacaccattccctaaccaggaaactggagggtacattttcagacaccctaaagccaataattagaccagtctggggttagaaaaatccctgaagcagaacaaactcaactgtctgggcatgtctggtgttcagcagaaggtgccctgccatgtgtccctcaaggaaacccagcaccgcatttggtgaccatcctttacctcctttgcctccttctcaaatcccatgttcaggggcttaaactcccacctttgaggatgaacagaacccagatcttgttctggctcctcctgctctgaagcttgccgtatgcaagccggtgtgcacacacgcacgcatgcacacacatgcacgcacacgtacacacacgtgcacatgcatgcacacacacatatgtgcgcgcaaatacgtgtgcgcatgcacataaatatacacacactcgcatgcacacacgtgcgcatacacacgcacacaacggtgctgttgtttttttatttgaagtaaacaccatctgtcaccctaaacgcacagcaggggctcagctgactgtggacagcagcctgtcttcccttcactctctcaggtccactgggccaggggggcgggagtttctcccaaaaatcaggagattagggaagctcctggaatgtctgaggacaacagcaggagattgcagagagcatgtgtctaatgctgcgtgcacacacacacacacacacactctcacacacactctctcacacgccctccttactctcaggagcacccaccccacaccccacacctcattgcatccagtgccattaactgatcgcttctcccgccgtaatattcgaggctgttcggcaaacctccttcttttgtttcctcttccccgtgctgctctgccgtccttctgaggggcctgctttgattaatatcaaccctccctcccaatctctttcccaaccattttaaagggcaattcctcttttcggcaggggcattgatcaatcgataccaagcaggggtcgggatcgatacggttccggggtctttggatactggggtttgatatctttttcttccccgaccctcccccttctgctacctagacccagagctttaagttcgactggaggggcttctagaacgcactgctgggggcctcaagaagcccaatgacctttaaaacaatgtgataatcagctgggcgggacggctgccaaagaccatcctgctaatcctaggtggcagtcccctcccctcccccatctctgaagctgcctgctctggtagcagcccctctcgttcaagaagccagcctccctgatcccctggctcgctgggaggagggcaccagcccaggtgggcaggagggtgagcccttgccggccctcccacttcctccctcgctccatcccaccacttctttcctgcgctcccagatctgctgtaactgacattttccatctgacaggttctgttttccctgcctctggttgccagggaaacaagcgaagaggaccgcagccagagagctgttagctgcctttttaaggcgccctggacataaacagcactttccataatggaagctgggcacggaggcttaaaaaaaccaaaacaatacagaagaggaggctaaagtgggaaacagtcggggtggggtccccaccaggttaatgggagagtaaaagaagaaataaaaatcctagaaaaatctcacactcttggacaaaaccagcccccttcctgaaaggtctgattctctccttgatgtgcaaaaaaggagaaactggacctccagacccctacctcctaacgtcttctatgaagccaaaatctctgcagccaagcctcagcccagctacagggaacctgggctctattgaggtgcaggggagctattcggattgaatcaccctccaggctaaaagacgctctaatggaagtgatggggtccgtctccaatttggagaccgcgcaggcctatccttcagaaaaggttagagggtttttgttttttgttttaatcttgagggacgcttgctccccaggcagctaggaggccagatgctggagtttgagagaaaatggctgaactgtaaggcaggcgagaagggaggggagggtgtcctcttcttctttcagaaaacttactagggttgggtagacagagatagctgtcactcatccctgggtcttctcaaagctgcccttgctgtgcatgcgtgtgtgtacgtgtgtgtgcatgcgtgtgtgcgtacatgtctgtgtgcatgtgtatgtacatgtgtgtgcatgtgtgtgcgtgtgtgtgcgcatgcatgtctgtgcacgtgcgtgtgtgtgcgtgtgtgagtgtgtgtgtgcacaagtgcctaaacacatgggcatacttgggtgggccttagtgagcccagtgggaagcaggcaatgtttactggggagccaccacaagcaacaccctgtttcttttccactcctctttcctccacctttacttccgccccaagcaactgagtaatggcttgctcttctccacgaccacctccaccagactctgcccatctcaccccaaaaaactcagcccaacaccccacactcctgatcctgtagacctcaatcttcaaggcaggcgacacatcaccaggaatcaccggtcactatttatactgcgtttttcgccatgtgtttgcacagcgttagaccttctttcatatgccatttgaatgatgtaaaatgccctgccttggccctgagtttcaggcctgcacttttatcttcctttgtgcctttcaacctggacgtcccagtgagcccatcaaactcaatcaattcagaacagaactcattgccttctccccaaattggctccttcacccagagttcctgagtcaaagctgcagtgcagtccatcccccactcctctgccaccgccacccacacacacacaccgggtctgtctatacgtcgtcgaacttcagatcctacttcttgagtatttccactctttccatctgctcccatcttgagcagcccaggctcccacagttttccctgagctgttgcaattgcctcctgatctgccaccaccccccaaccacccctccatgccttctcctcccctaagctgctgccagcagtcatctttccttacagggacctgccctgctgcggagcccgcagtgattctgcttaagagcagatgcaaaaccctgagcctggcacccaatgcccttcgccacctgaccttgactgagcttcccagctccttccctctacgcccggccctctgaccaggcctgccacgcagagactggaagccctttcacacctccgtgtcctcaacctggaagtttctgccttatccctgctcagcccagcaaatgctgacccacgtcccagtcgaagcctcacctggctgaactggggtcccctccattcaacactcacctcttctgtggagcaccacgccttcggtttggttacaggcttgttgccccacaggtctgagcactcttcgggggttgacaccttgccctgcacccccagcacgaggtgcagtgcattgcatgtcacaggtactcataaatgttctctttttgtcttcgccgtgggccccggaagggggaaagacagatctcctgtagtaaaaaggaggacatgactgtcgtcatcctgaacgcttgtccacatgcatgacgacatccctgcatgaaggagcaaagccgctggctgagaggaaggaccgattttaaatgtattcatttcataatctttacagtgatatattagaaacattctaaaggattaaaatggggccgggcacggtgcctcacgcctgtaatcccagctactcaggaggctgagacgggacaatcgcttgaacccaggaggctgagcttgcagtgagctgagatcgggccactgtactcctgggcaacagagcaagactctgcctcaaaaaaaaaaaaaaaaaaaaatgcagagagacggtcaggctccaaattggaggaaatgaactgggactgtttgggaggtgccacagaggacgtggcaaggggtcaggacagtgcagcctggattatggcacagaggggatgccagatgggggaggggacgccagatgggggaggggatgtcagatgaggggtagctgccgtactggccaggggaggccagtggctcacaccctgaacatgcgtggggaagaaaagagaatgaccccaaggaggtgatactcgagaacacctaatttcacatcagaagagactgaaacaggcagcaaagagaccatgagagccaggtgtggcagctcacacctgtaatcgtagcactttgggaggctgaggcgggtggatcacttgaggtcaggagtttgagaccagcctggccaacatggcaaatccccatctctactaaaaatgcaaaaatcagctgggcgtggtggcaggtgcctgtaatcccagctactcgggaggctgaggcccgaaaatcacttgaacccaggaggtgaaggttgcagtgagtcaatattgcatcactacactctaccctagtgagactccttctcaaaaaaaaaaaaaaaaaaaaaaagacagagaccatgagaatatgtgtgtgatacagctgagaacacgaagagcagaggctgagatggacagtcaggcagaggggctcacgggtgatctattttttcaaacatatatttacagttgactcttgaataacatgggtttgaaccccatgggttcacttattcacagatttttcttctgcctctgccacccctgagacagcaagaccagcctccccccaacacacacaccttcctcttcttccccagcctactcaaagtgaagacctttaggatgatccaattctgcttaatgattagtaaatacgtttcctgtttcttacaattttcttttctttgcttttttgagacggagtctcactccatcacccaggctggagtgaattgacacgatcttggctcactgcaacctccacctcccaggttcaagcaattctcgtgcctcggcctcccaagtagctgggactacaggcaccgaccaccacacctagctgattttagtatttttagtagagacggggtttcaccactttgaccagattggtctcaaactcctgacctcaagtgatccacccacctcggcctcccaaactgctgggattacaggcatgaaccagcactcccagcctgctatttacaattttcttaataccgttttcttttctgtagcttactttattgtaagaatagagcatataacacataaagacatacaaagtaggtgttcgttgactgcttgtgatattggtaaggcttctgatcaagtaattaagtgttgagaaattgaaatttatactcaaattctccactgcatcggggtctctaagggccagcgcccctcacccccacattattcaagggtcacccgcaaggccgttatgctattttcacacttacaaaaaaaaaaaaagaaaacccagggcaattccaatgaaccgttttgagatgctgtggggcctgagaggttggggtactcaggggtgccgacgtgggtgtgcaggctggacagaggcaaggggctttgcaaaggacagtccaccaagatgatgaaactgggaggatgccagggcaggtggagctggaacagcccaggtcgccatgcctcccatcctgtctccccagttccctccccatctttccacttggctgtgatatgcactgggctggatatgggcttcagtgaccagccatcagctcctgcctcacctcctctagggattcaggtcacgtgtgaccaagtgatggagactggcaacggctcctgcaatgcccaatactgttaataacagtaggaataaattttgcattgctggtttgggggtgaccgggagggtctctagggccacagccatcttctccaggtaggctggagcaaaggcttggctctgagggtctggcttggatctccagtgccaccctagtacagacaccactgatgtctgtgagggggccctcaacacaacgatgccaagcggccagagacagtgaaacagccctgagctcacagaagcagacaatttaggagctacctctctgcattattccaaccctcagaaacctcgtgcttttcttcccagaagcaaagggtgctgacttgttataaatgccaaggttgcctcaggaagctcaggatcattccagcatccaggtggccaaatcccaggagacgagaatgatcgtgcatgcacctcatttgcgtcacactttaattcacagagtgctttccatctttcatgtattttgtcctctccattaccctgtcagataagcagggaagacatacgtttacctttcctgtatgtgcgtcacacttggacagctcactaaatgggttgtcaagtgattgcagagggaaactgaggccctaataccttaggtcaactgtccaagaggccagagtcagagcaggctcaaaaggagttagaagactaacttctaagtcaggactctacttggatactattaccttctagaagacatccctaatgatgatgatgatgatgatgatgatgatgatgatgggggcttgtataagcttcatgttttgcaggttcgtaatagataataaagttggagaggggatgaagaaccaggctaaagaggatcttgggtgtcaaggtcagaagtttccacttttctcaggagcagtgggaccccacatgtcttcagcaggaagtatgtagtggattgaataatggtccccaaaaaggtgtgttcatgtcctaatccccagaacctgtgactgagctcttatttggaaaaagggtctttgcagatgtaattaagtggaaggtcttgagatgaggagaccacccttctgagtctgctcaaactctggccccttagacagttggtataaggtttctgggcctcagtatccctctatagtcatttgacaacccactagtgaattgtccaagcgtgatgcacatacaagaagggtaaacatatgtcttccctgcttatctgacgggcttgtggaggggacaaaataaatgaaagatgggaaagtgctctgtgaattaaagtgtgatgcaaatgagataattatcctggaatttgtgggtgggccctacgtccaatcataggtatccttataaaagacaggcagagggagattatgcagacagcagaggtggaggtcatgtgaccacggaggcagagattggagtgatatggccacaaaccaaggaacacagcagccggcaaaaactggaagaagcaaggaagggttctcccctagagcctccaagagggagcatggccctaccggatttcagacttgaggcctccagagttgtgagagaataaacttccattgtttgaagccaccaagcctgcactaatttgttacggcggccacaggacactcatacagggtgaaatgtgcaatgctgggggtatgggcttggtttcatttgctgctccctccacactcagggcaggccctgctcacctctttggactgatagagagccagcctctgggcctgacccaaggtcacaaggtgggtgagtgccaaggtgggaccagggcttgagtgtcctcaccgcatcccaggttctccctcgccaaactccagaaggccaggtgggccgcagccactaagaactttgtcccttcacaccctactctgtttatttgctacctagaccctgctcaggatctacagatatttccatatgattttcaccaatgtagtaaagattcaaaagaaaaaataggggggtggttgggaggcaggccccaagttctaggaatattcattccccttttctctgcccatgctattgtggtcatgcataactcagtataactctgaggaggccatgattgagactagggcatccagagagcccttggtaattcctcccattctcgggattatccatctttgaggtcagacccaaatctctctggtcctcagtttttgcctctgcaaaatgggatcattttcatgtactccccacagctgttatgaaggataaattcaatcagataatgtgtgcaacatgttcaggaagatggacatgtcaaactctccatggatgatagtgatgatgatgatgatgatggtaaagatgatggtgatggtggtgatgatggtaatggtgatgatggtagtggtgatggtgatggtagttagtgatgatggtgatggtgatgatagtgatgatgatggtgacggtggtaataatggtgatggtgacagtggtgatgaaggtgatggtgatggtgatagtggtgatgatggtgatggcgatggtgatggtgatagtggtgatggtgatgatggtgatgatggtgatgatggtggtgatggtaatggtgatgataatggtggtgatggtgatggaggtgatgctggtgatggtgatggtagtggtggtgatggtgatagtggtgatgatggtgatggtgatgatgatggtgatggtgatgatgatggtgatagtgatggtggtggtgatcatggtgatggtgatggtgatggtggtgatgatggtgatggtggcgatgatggtggtggtaacggggtgatggtgaagataacaagtgattgaaatgggcaagactcccaggaggctgtggggctcatttaggggcctagggagtccacaggaagaaatccacattctctagcctttctaagtgaagcaaacttgctgtgatcacactagaacagcacatacaatgcccaggtctccaggaccatgccagctgcccacccggaaaagctattttcctttgctacccatagaaaacctttgggtgcctccactcctggggcaccggcaaccccaccgtcagcccttcatttctcttgcctttcctggatcaaggagcactgccaggctgcctctatccctgagagttagatccaaataactgcctttgttatgttaattttgcaagtgtctccactccccccccccaattatttgtcatgcagcaattcctatgtgttgctaaaaatacaaacacatgactcacacagcttctggcatgggtaaaggaaagagaacatgcatggcctttctgctcttcggagcccagccaggacaccaatccaggctgaggggctgagaataagcttgtctccagttgcagaaggacagaaaacaaaaggcccagatgagacagaaggctccaggctggtcagctgcatctctggggcatgacaccacagttatgaaatcctttgcatcacttgctctgctatttggggcattaccttgtgaaaggttcagatctcagttcttgtttagggtcttctgtattccacacccacatgctcataccagcctccatgtgcccagatgtgcctgctactcttgggccctccacaaccttgcaccagcaaggggcgggataaatcttcagggcaccaccctcattcagaaaaggaagacggctccattctcaccccttccctgtgatttcccccagcagtccacgtgtccctaccctggggatgcttgtgcaggttggacttcatttgcttcaaggacagaccctggggccaagaagcagcatctcatgccagtgaagagatcaaactctagaactggcaaatccggctcaggcaacctctgcttttttatcatccaaatgggagcattaacagacaccctttgagggtgatgtgaggattaaggaagagacaacctgcaaaaccatcagcccaatgcctgacccagggaaaggttcaatcagtgtcatcactgaggagcacatattgtttttattatcatattcgtgttcccaaatccagaggtcgtctggctaggcagagccatactttgctctcccaaattcggggctcacttcaccccatgctcaccttacattggggccttctgcccctgcttcctgggcacttcagcctctgagtcaagagggtggttggctgaaaagcaaacactgtaagtccctgcccctgagacgcagcagctgaagaaagcaagctttcaagagcatttgcttggcagccaaagccctctgatgaatcagggaccttttctgatgacttactttattctaggtgacctgctgggccatatcccacttccctccagggtgctgagccggcaggaacgagcatgcggaggaggcaaaaggggatggagatggatttgtgcttagaaataagatgtggaggagtccgcctcaggtccccaggagaatctgtattgccttggctggagctgagggactggacatccggtcccatgcacgaagaccatctgccagggccaccacctccttcctcctgagatgtcctcctccccaaatgctcagcctccctgcaaatcattctacttctctgtggtcagtgtacagagagggatttggaaatgggttggggctggggtagagccacatagaatacagtgagaatgatgccccagggcactgtggggtctctggggtgcttttcatccattcggcaaaatacgtcaagcaactactgtctaaggtgtggcattcagtgtcacagtgaataaggaaaggttgtcctgggggtcaggaagggaaatgagaccacacacaagcaatcccatctctaacctgagcactggcagaaagtagcagggacttccttctaggaaggaagtcaccatgtcccaagaaagctcagcggccaagcttgctgggccctctgtgggaagatggcaaaagcagaaattgacctcgtcatcaatgagtatggcccagggagacagatggcaagctgagctcctcacctggctgatgtctatttcactgaagtctgagctagtccagccgttggagtctgtgtgtcactagcatatttgtaggtcatagagtacttgttggctgatcagggcccagagagcagccactggggtatcagccagaacgtggaggttgggttcagggccaacaccaatggggttgggctctagggtgggaggtgcctatggactgtaccctggagaacccaaagaccatagccaccttccaggccttctttaccccaaaggcctgtgatttccaaagctaggtcataagcacattgcagccttcacttgctctctcttgcatcccttcctctagggaaagagccgccatattgtgacgatactcaagagccccatggaaaattccacatgaagaggaactgaggcctccagccaacagccagcaactacttgctcaccacatgaatgagccatcttggaagcagactctcccaccccagttaagccttcaaatgactctagccctgccaacatcttgacaaaaggctcaggagagatgccaacctagaaccacccagctaagctgctcctgaatttcctgaatcacagaaactatgggcaataacaaatagttattattatttgaatcccttaagttttgaggaaatttgtgatgcagccatagataatgaataaaaggagtttccgttcaggtagacattccttgagctttgatctttacttgaccctaggaagcaggtgtttcaccgagcctcccaccttatagtccttttccctgtacctgccttgtcttttccatctagttcttcttgtctatgccactttacttgtgattttctctatttggggccatctagggatgttttttagagcaagatggtcatgtttaattttttaagccaaaaacagctgtaatcgccttttaattatacatacaggatagagactgtgatatggttaggctgtgtccccacccaaatcccatcttgaattgtaataatccccatgtgtcaaggcagggccaggagaagataattgaatcatgggggcagtttcccccatactgttctcgtgatagtgaatgcatctcacgagttctgagtattttataaagggtagttcccctgcacatgctctcttgcctgccgccaagtaagatgtgactttgctccacattcgccttctgccatgattgtgaggcctccccaaccatatgaaactgtgagtcaattaaatctcttccctttataaattagtcttgggtatgtctttattatcagtgtgagaacagactaataatacaggctggaaggggcaaggacagagaaaagctcataattaaacctctgagtcagagaggggtacatcctggcagaaagccaattcctaaactgaccactccttgtctaacttgggcgttaagtaggactttttgttattaagatggtgaacttttagaatgttatttttatcatttgcctgccaaaatagattctatcttcttgcccctttgggatacatcgttggaataatggcctccaattaattcatgcctgcctgtacccgtgccctgagtagccccctccttgactgattctgggcttggccatgtgtttgactttggccaatgaaagaatggcaagtgtggcaccatcagaggcttcgaaagtgcttgtgtactaggagccctgaaactaccttgagaagaagcccaggtcacctcctggaggatgagaagcaacatggagcagagatgggccatctcagctgcaattctagaccaacaagcctgccacctgccagaaggcaagcgaagccaccccagagccccagcgccagccgagccaacagcttgccatacgaatcagccaaacagcctagaaaagaactgcccagccaatccacagaaaacagaaataatcaatgttattttaagccattaaatgttgaggtggtttgttacgcgtacactttccaacctctatcccaccatgtgttgctggaggacaaaggttctattttatttacatttgcatttccattccatgtctttccatgtgtatttccattgcatgccctgtacacatgtatgggcgtccacatgcacatgtgtggcacatgacacacacacatagaaacatgcacacatgtacatgcaacatgtatgcacacacacttctctcacatgcttaactcctaaattaattgtagacacgaatttctttctttttagtttagtttttttttttttttttttgagatggagttttgctattgttgcccaggcaaagcacaaaggcacgatctctgctcacaggcacccgccaccacgcccagctgatttttgcatttttagtagagacagggtttcgccgtgttggccaggctggtctcgaactcctgaccacaggtgatacacccacctcggcctcccaaagcgctaggattacaggagtgagccaccacacccggcctctttttaatttttgttttagattcagagagtacatgtgcaggtttgttatgtggatatatttcatgatgctggagtttgagcttctactgagtccgtcacccaaatagtgaatatagcacccaataggtagtttttcaagcctcggctccctccctccctccctccccacttctggagtcccccgtgtctattgttccgtctttataaccatgtgaatccagtgttcagctctcacttataagtaagaacatagctgcatgaatctcaagcatcccttctgcaacttcctgttgggatttttcactgcactgtcagtgcctggcagccccagacagcaggtgtagacgccctgcattctcaggctttagagaaggtcactctaaatcctgaccgggacacggtccttccccttccaatgcttcaacaccatagacaggtggcggaggggaagagctgtcagcgtgttctcggctagctgggcgatgagacctgcaagaggtggtgatggagacctcacagggcaacagagaccaccccccttaattccttttccaggggtagaacttatggggtcccaggccagctgctggaactacctctgtctacacagttgagactttcccctggctggggcctgagtgaacttagctatgaccaaagtttctcgtggcagcctgagggactttttataatctgtgctgtgatctgagcctgagaaataccagcctgcctcccactggccccataacaacagggcgcttaactcaccatcctctacattcaccacttgggagagcttctcagagattacggggtccaaggtcaggctttcattctgaagcagcccaacattcagagctacttgccagagacgggcaggttagacataggccatgcctgggatctgggtctgcaccaggcttggtgccttacctctggccctgcagtctccagcctggtggctggtcccagggaagccttcctcctgcccctgtgaatgcctgggacctggaattattcccctgctctcagtcccaaaggcctaagccaattctatgagaaatgctcagaaactactgcttttaacaaaatgttgcccctagatacagtcaaacactgtttcgggagtgtaagttgctgtaagctttatgaggataatttgacaatatatataacattttaaagtggtcattccattgacatagcacttttacaaatttaccttcaagtatacaaagtttaagaatatttaattgagccgggcgcagtggctcacgcctgtaatcccagcactttgggaggccgaggagggcggatcacgaggtcaggagatcgagaccacagtgaaaccccgtgtcttctaaaaatacaaaaaattagccgggcgtggtggcgggcgcctgtagtcccagctactcgggaggctgaggcaggagaatggcgtgaacccgggaggcggagcttgcagtgagccgagatcgcgccactgcactccagcctgggcgacaaagcgagactccgtctcaaaaaaaaaataataataaataatatttaattcagtgttgctcataataacaaaagaaactgggagcaagggatggatcatctgtgcccccaggacaaggcagacccaaagagcaagtgaacaaaatgaaaaggcaccaaagaaaggcagtttgtttgtttggggatttttttggccaattagaattcacactttttagggtgagaatagaatactcaaatattacctaataatacttattttttatttagttacatattttaaagcatgttatataaaataataattcagaaatattgctttttttctacccctatattttgtgaaataacctctttccgttcatttttaactgagcgtcctgggcaccacaaatccccttttgggtcattgagtaattttcagaatgtgccatctcagtggagattttattctgggccatcggggaacatttacttcatatgaggacaggctttcatttggttttgtttcatccattcatcttgcaagggaatattcatgctttccacaagagaggtagctacttacttaccatattgctttttttttttttttggcaaggtctcactccatcacccgggctggagtgcagtggcacgatcacagctcactgcagcctcaacctcccaggtctaagtgatcctcccaccccagcctcccaaagtagctggaattataggcacgaaccaccaggccagctaatttttagtatgttttttggtagagaccaggtttctccatgttgcctaggctggtcttgaactcctgggctcaagaggcctcccaaagtgctgggattatgtattgcactttaaaatactatttaaagttctatttacaataccattgagtaaagtctaatagaggaaatgtaagataatctttattttcgagggaattatttttaaatcttgccttatattaacttatgcacaataaatgtctatcaataagggtttcccttaatcagttatggcacagccatgcagtggagtactatataacctttaaacagatcaagagatcttgagcacagaagatgtctgcagtgtatttctgaatgaaaagagcaaactgcagaacaatatatacagtctaattctatttttcaatacatatatgtgttactatccacagaaaatgatacagattaaaatgtcatattactaatagttactgaaattgataggattgtgaaagctttcactttttcttcctatatatctgttgtcctaaaattttcttataaatgagtatagcttccttttataattataaaaaaggttaaaattaaaaataaatgtattgtgccaatcctaaaattaccaaccataagttgctcatcagatttatatgatagacttcatgatgcttaatatttgtggataaattatcatttctgctgtatagataatgccacttcataaatatacagaaaatcaagtggatttccaaaatccgaaatagactctcctataaattaaaggagactgaagaccctggcatgattctcagggaacaaatgtttccattgtaaccccctgaactaatccatgaggacataccaacctcagggcttagaagctcttgcaggggcctcctggcattgtgactaaaaccacagttacattctcttttaatgagcccacaggcacaccagagatccctgctgcattcgtcaggatgtgctaggggacaggctcgctatggacaaccagtcccccactgagagctagaaagctgggtaacgtgagacacccaggagctctcaaggcaggaggacttgaacaggcaggccaggaccccagagtgaagggagaccccatgggctaatcatgacattctacacttctttccttcctggggtgtctgttgatccataaatggcttggacagagggccaagaagctcacaagacaacagcccctaagagacggagaaactgagccgtttcagccatcccatggggctggatgccaagcattggaattcagatctatttaggaagccaggatttatagggatcaggagacaacaggatcccagagagaaaagaagatgcccagagaagtcagttcgacacactgggccactgttgtttgcaaggcactcagcggtttcgaagtggcacaggccacgaggaggtaggtggagaggcagaggcaatatctgaagagataccggctgggaattttcaaacctgacaaaagacatcaagacacatattcaagaagcacttagaaccccaagcagaagcattataaacacacacacacacacacacacacacacacacacacacacacacacacacatattcacagtctccctggtacatcatcataaacttgctgaaaggcaaagacaaaaagaatatatcaaaagcaacaacaacaacaaaaacatattagcttcacaggatcaagaattcaaatgatagctgattctcaacacaaacgtggaatggaatgacatctttaaaattccaaaagaaaccaaaaattgactagaaaactaaaatatccttcaaaagcaaggtgaatggacccaatagaaatgcaaacatttgttcaccaagagatatgcacaagagggttcacggcaatgttaaatactattatactaatgtcagacaccggaaacagaccaggcgctgtggctcacgcctggaatcccagcactttgggaggcaaaggcgggtggatcacttgaggccaggagttcgagaccagcctggccaacatggtgaaaccctgtctctacaaaaaatacaaaaattaacagggcatggtggcacgtacctgtagtccctgctacttgggaggctggggcaggagaattgcttgaacccgggaggcagaggttgcagtgagctgagatcataccactgcactccagcagtctgggcaacagagcgagactccgtcaaaaaataaaaataaataaataaataaaaacaacaacaaaacaaacaaaaaaacctggaaacagctcagcacccatcaacattagaagagataaactgtggtaagatttataacattgaatgctacatggcaatgagaatgaatgaactaggactatacctaacagcctggaagaatctttcagacactgaatgaagatggcagagacaaaaacaacaacaagctaacctttgttgtcagaaaccagggcagtgtttaccttaggagcaatagtgatgagaagagccttgggaggcagcaggcgggcgggggaagggggaggttctggggaactggtaacgttctgtttcttgatctgggatctggtttcatagctatattcacttagtgaaaatgtatcaagctgtgcatttataatgtatgtgactttctgtatgtatgctagactttaataaataatttacatataacatggaagctaaactataatttttacaagacaaattcgagagaaagagctaatatttagtgccaaatgcacagtaggtggtgaataatttttttaaagcccagagaaccctcagatgtaagattacagatccccggctttcccggcgttcccggcttttctctaagcaatgactcacacctttatttagtatacctaaagttttttctaattacaagagggaatatataattattataagaaatttagaaaaatatagaaaaaaagtaaggaagaaaaatgtaaaatacccacaaccccacaactccaagtttatgtaaagtgtttttatttctgatcatctttttgcacacttgtacactaatgttgtgtaagtgtgtgtttttaccttattcatttagcagcatgcaataaacacttttctttgttataatgaagtaaagaaataaaagtgagggtaagataaagacatttccagacttcccctcaaaaaaaaaaaggaaagaatttattgccaacaactcacactaaaagataggtaaagaggagatttttgagcaaaggagtgtaatcccagatggaaactaaaaaaataaggcaataaagaaaatccctggaaaaggtaaacatttgggcaaatataaatgaatttttactacataaaacaaaatgaataggcaataaaaattcaggttaaaacataaaaaggattaaatgacaaggaaacaatagcataaaaaggcaggaggggtaaatagtgtaaaagctttccaaagttctggccttgtctgggaagtggtaaaagttttgctctatattagtcttcagtaaatcaaagatgcatgctataacctcaagtagaatcaccactgcaagaatagtaaaagacagtctcactaacaagctaatgacagaggaaatgaaataataggatttactcatttcatcccaaaaaaaaggcaaggaaggaaagaaaaaaatgaacatagaatagatgggataaatataaaacccacagtaagatggtatgtttaaacccaaacaaatcagttattggattaaatgttcaaccaacatgccaacatttattaaacaatatataacaagtgttaaaggttggactaatatggcgaaaattggactgaatactccaattcaaagatgaagattttcagactcgattttttttaatcaaactatatgctccttatgatatcacagaaatgctgaaagtcaaaggatggaaaacagcacaggtttatttctggctcctgtaaggggcaccaggctctgggtgacctctggggcatgactgggcctccacgaccttggtgagtgtcacgcaagcattcaatgctccctagaggatgtggccagcattgctgtattcacatttcatcgccaaggcacaccacacggccgccactccctccagggaccaaggagcacagcccttcatgcacagagggagcccagtgccacacggtccctgcaggtggccagcccagggggagagaccaagagtgggctgtggctttcacttttggccatggtcaaagacttcacctcggccggtctccagcagatgtcctctcctggtcataacagtcagggcagctgggcatggtggctcatgcctgtaatcccagcactttgggaggccgaggcaggaggatcacttgagatcggtagtttgagacaagcctgggcaacatagcaaagccccgtctctacaaaaaaaatacaaaaattagccagacatggtggcatacgcctgtagtcccagctacttgggaggctgaggtgggaggatcatttcagcccaggaggtggaggttgaagtgagccgagatcgccccactgcattccagcctagcctatagatccagaccatgtctcaaaaaacaaaaacaaacaaacaaaaaaaaaaaacaaaaaacagggcaagcacatacatggacagctggaaacccatctcgcccgcacctgccctcctgccaggtggtcatgggcctcacttggtccaattttgtccaggtcaccagtggtttcagatttggatgagaagataatggcttcaccttggatgctctgggccgatgcacttggggaagattctgtgagcttttggattctgggaagagtcggcatccagtaggcagtaaggtgcacatgccaggggctcaggggaagccttgccctagagacacaggtgcagatgtgccccagttatcttttgctgcacaaataacagcccccaacttggtggtgtcaaatggccattttatgatgctcatctgtgggtcgtgaatttggatgaaaccatccacagcatggacggtttgtgtctgtgctggggaatctaggacctcaggtgggaagagatcttgggatgggagtgtgtggctgtgagacccaatctccatcctgacctgagaaacggtgtgacctcaataccgatgagctgtcagagggaaatgaagtgcccggccacttccctggaggcgcacgcctccccttaatctcctctctccacaccaaatgcgggcctcgagagggggatcccagagaccccaaggcccatgcgctgctgccctctggagacaccccagcccccccgctcctccactcacactcacacacacaccctcacgcatgtattcacacatccttgcacacatacactcagacccttccgaacaggcaagacggtgcctcttgctcagaccccttcccggaccaaaggacaaacagtgaagcacgggctagagccctcctcacccaattgtcatttttattggtagccctggattcttccggcagtggagagggaggaggtgctgacgaaatctcacagggaagctgatgagaagcaacagccaagaactgcccactcgtgggagcagcctgtctcttcccacctctgccaggagggtgtggtcaccagaattccccagctggacaaaggaggtcgagggaaggtcacccctcccagcaaagtaaggagagtgccctgtgccctgtgctcaggagagattggggccgcacccacctggcattgccacacctctggcctctgcgctcccagtcccttcatcactgcaagcctcggttcccgcctctgtcaaatgggcattttcatgtcataaagcttcccaggtcgttttcggagaattccatggcagcccttatgaaagcaccctgtacactgttaatgcaggcactgtaaaatactatgattaaaaatcatattttctggccagttgtggtggctcaaacctgtaatcccagccctttgggaggctgaggtgggtggatcaccggaggtcaggagttcaagaccagcctggacaacatggtgaaaccctgtttctactaaaaatacaaaaattagccaggcatggtggcaggcacctgtaatctcagctactccggaggctgaggcataagaattgcttgaactcgggaggctgaggtcgcagtgagccgagatgacgccactgcactccagactgtgcaacagagggagagtctgtctcaaaaaaaatcctattttctgttagtggagggggcagaggacagattctgggaactgtatgtgcactcaggacctcttccagcattgcatggaaatgatctctggggcctaaggaagcaaggggagggccgtaaagggtgccccggagccaggaaagggcatggaggcagtgtggcctgttaggcaggtggcatcacaatttctgccaggccctgcctcaccccaaacggtttccagaaaaggcactgttgccgtgggaacactcgtccaattattctactttgcagaaaatcacttttcagccaacttggttagaacacgtcccttctacagagcaaaaattgcatcttggtttttgacctcacccatgaccaaatatttgagtggagaagtggccagaggactcaggccacaagagagatggtcatctagcgggagatggcaggagagacccaagccctgtaataaaccgcaggtggactccagatgtctgcaaattgacagacgagtaggagcctccttgagggacgaagggacagcaggagtggggaaggattgaggttgctcgattccactcaaccagtggccctgagggccaggccctgctagacactaggaaagcagagatgcttccgacaccactttctgcctctgtggggggctcagagtccaaaggggagtggacactggtgagcagattaacaataagtgacaaggacaaagatagaatatgttctaggtagtaagaagtagctcaagggaggagagagaatggaggagggtaacttggaggctgggttttgacgtatgaataggagtttgccaagcagacaaagggtaagggagggtgctctgggcagaggaagcacgagtaaggaatggagtcatgcaacaacaaagtacattatgagaacaacaggttgttgagcagcgtcccggtggaaaacaccaagggggagagacagaatcgtcaggttggaagctgagtgcgccctgcagagtccggtgtttggcctttgtgcagtgggaagaatccccatcggactggcatttgacaaaggcaggcaggacagagggcaggaaggaagggcagaagaccagccaggaggcaagaggcaaagaagcctgaaccggcgccagtgtcaggcaaaaggagcaggaagagaggatcagcaggcctgggtcttgggggatggagggccagggccaggaatgaggagaaggccctgccagttctcagcctcgggagacaaagtttagagatggcttgaaccaaatgggggacagaggaaggcttggtctggagggtggaaatggggcagattgagtcacattgaggaggaggggcccagggagcattgaggaggttggcaggtgtcaagtgctattgagccaaactgcctgagttccaactccagcactgcagaatactagctgtgtggccttaggcaaattactgaacctctctgaggctgtttcatctctcttatgaggattcactgaagtccatgtgaaaagcacgtagcccaggaagggagctgatatgggctcttaaggcccagactccctggcttcctggccagggtcctcctgcagcctccacggcctatggcccctgcgagactcagtaaaatgtgttgcgtgcagggccgccctttaccaggcccatgagcctgcctggtgccctccagggtgaagaccaccttgtccagctgcccctcctccccataactcacctggccatgctaggcacagcagagcgaagatacattttcccaagcaagcgagacccaagttacagctagaaatgtatggaatatgctgtgtcacacggaaaacggcaatgcctgaaattccaggctccctccagctccccactgaatgcacatcctccagggacatcccagaggcaaaagaggtgggaagaaggggcagggctcccccacacctgagtccctgctgtgggttagggatgcccgtctgatctcagactggcagcatctattcaaccatgtctacctcgttccctgagggtgggaaggactcgttctcttacacgacttgtttcacctttaggaatcagcggacagtggagcatagcaaggaaatcctcccaccactcaaattagaacaaaaggtgcctgcaatggctctgcagtgttcccctccttcctagctgcttctggtgtgtgcagaaccaacagcatgatgaggtcaaggaccaggccaggatccgctcagcccaggaagaagggaaggctttcaaaaaccatgatttgaactcgcttagttgctcttcaatgaagtgcagagcccttggttccctgcacgcacaccagcacgcccagcctgcgcgttcctctctgctcctcccgagacactgcaggctgcacctacgcgagcgcttggtcctccctccctcgtgtcgtctcaggagctccctgcaagaggcccaccctgcctatgagttcctagtctccggggccctgccttagttactttgcatgtgttgattggacattaatcccaagctaggtattttaccgacctgggtgactttactttttggggaacagaggcgttctttgtcagcttgcccgctctgtggactttgtgtgcatgtgggtggctgtgttcaatggatgacctgctggcacttgggatggaacagtccagtctcctacctcctggctgtgccttagagaagtctgaggaaatgacttccctggacaatacacacctctccactagattgctgctggctcttcaccagcaaagccacctggaaggtagctctggcatggagagtttttcaccaaccctgagctcctcaaagatgctcacctggctcaagccacttccaccttcctccttctgtgcctagcacagtgccaggcatgtaggagatgctggcaaatgtgtgtgaactcattcattcattcattcattcattcattcatctctaagatggtctcaattctccctaaaggccagcattcctctgcaagagactggagaacctggcgtgtatctgtgtaagaaaaccctctgtggagagctggtagggccatatggcccccaaagaacaaaatagaataagccggtatgggggactagacaggggcatgtccaggtgccagggaacatgagtaccggtaggcagctccaccaagcctggctgctgacggcagagagcagactgggggagtccaggcataaaggccaaggtgtgaccttgacccccaaaggagtagaggagagaccgaggcagcaggactctggctggggctgacagcccaaagtctctcctacagagcagtggtcagtgcccgaggagcattagaagggcactccctcagggtagctccccccgccctgccacccctccccatcactgcccccactcaggaagcagaggctggcttccccgagccaggaattcctagacccccagggtgtctgtgatcatctctatccgcaacccccacccccaccccccgccgcttcccacgtcaaggagacctcactgccaactcttgggaaccttcattgctggcatctgctagagatggcccctgggaccttcagggcctcagacacccacccacacacccaccccaatttcccagaccatgcaacagtgtccttgagaggcctctcagagcagggcaggatcgtgagcttgggggcttcacagacctgggatggaaaacagcacttacagttgcctggccttgaacaagccaccctcccaggcctgaggtttgcttgtctattccgcagaggggatgacaccgcccccacccccagaactgctgggaaggggagccatagggtgacatgcagacagcacctgagacagagctttcccctcctctccacagcctcccgccccaccctgctccgtgagtggagtgatcacatcttccgcacccaaaattgaaacacgtggtttgacaaaggatttctgggctcttgctagatacacaagggggtttgaaggattccatctgaatgtcaaaatggcaggaaatccacatcctgcaggtgaagctgactttgaaaacaggactgctctgggactccagagtgagtctcctccacagacacaagggttggtcctgcctgaccccagatatccagccttccccctcacctgctaccttgcccattacctgaggcctgggctgcagggtgcccacccccatccttgatgcagcaacaaggactgaacgtccctggctcagcatggagctggtgccaagagcagcccaccaggcagaggaagagaactgaatccaccactactgcggagggaaacgatgcaattcataaaaagcatcagaccctccccggccccggcatcactgcaggtggagacagaccccaaacaggtgcctgggcttccactacaaatcaccctattgggaaaaaaagggtgaaagatctctataatggaaaaccatgactcagttctgttggtttgtttgttttttaaggcaaagctctcagctctgcaaaacaatcccagggtccttataatttaatcaaaaggtggggcatttggtccaccctgaagagccaggcatcattttctggatgtctgttcagctggaaggagaatgaatctcttcctttctaaaacaataaaaaggtggataattagcgtgtaatggttaatgggtaattttacaggggcgagctgagttcataacatcattctgaatatatttgcatttaactgaactccttttttctgtctctcttctgtgattttttttgttgtcactgtaattattttaattgagatcttcctgtaatgaaaacaaagaacaatgtctgtgggaggcttctgaggtggccgtgagcttggcggtgcctcctctcccaagtcagctcagggtccgcaagcccctcactcagcctctggaggcctctgccctctccacctgctctctcactcggctccactgacgacaggaacaggcagggaggctttgtgtatgcgtgtgtgcctgtgtgtgtgagggcttctgtgtgcatgtgtgtgcatgtgcccatgtgtgtgcatgtatatgcatgtggggtgtgcgtgcgttcatgtgtgtgcatgtgtgtgagcgtgtccgtgtgtgtatgtatatgcatgtggggtgtgtgtgtgtccatgtgtatgcacgtacatgcgtgtggggtgtgtgtgtgtccatgcgtgtgtgcatccatgtgtgtgcatgtatatgcatgtggggtgtgtatgcattcgtgtgtgtgtgcgtgtatgcatgtatgatgtgtacatgtgtgtgcatgtacgtgtgtgtgcatccatgtgtgcccgtgtgtgtgcatgtatatgcatgtgggggtgtgtgtgtgtccatgtgtatgcacgtacatgcatgtggggtgtgtgtgtgtccatgcgtgtgtgcatccatgtgtgtgcacgtatatgcatgtggggtgtgtatgcatttgtgtgtgtgcacgtgtgtgcatgtatgatgtgtacatgtgtgtgcatgtacgtgtgtgcatccatgtgtgcccatgtgtgtgcatgcatatgcatgtgggtgtgtgtgtgtccatgtgtatgcacgtacatgcatgtggggtgtgtgtgtgtccatgcgtgtgtgcatccatgtgtgtgcatgtatatgcatgtggggtgtgtatgcattcgtgtgtgtgcgtgtgtgcatgtatgatgtgtgcatgtgtgtgcatgtacgtgtgtgtgcatccatgtgtgcctgtgtgtgtgcatgtatatgcatgtgggggtgtgcgtgcacccatgtgtgtccacgtatatgcatgtggggtgcgcatgtgttcatgtgtgcatgcatgcatgtgcgtgtatgcacgtgtgtgtgcatgtgcatgctttcgtgtgtgcatttgccttccttcactgaccctcacctgttccaggacagagtcttgctatgttgtccaggctggacagtgcagtggctattcacaggcgtgatcacagctcactgcagcctcgatctcctagcctcaagtgatcctcccgcctcagcctctgagtagctgggaccacaggtgtctgctactgcaccagcttcagtgcagacgtgcaaaggtacaaagtgaacactcaggaagctcagagagagcctgtggtccccaggaaaggcagctcaaaggcagcttctagggataaggccagcaaagagcttcaggctgtgcatcacatgtcgaccaccttggctttggggtcctaaatgtaccaaacacagggaggatgggaagaggtgcctgctcacagaagcctctgtcccagcacagagggggctgccctcgtttcttcagctccctgtctctccacatggtcaccaggagcattgctcaggaaggccagtccctgggaaggaacagtaaccttcccagaatgaaagccgcagtctaagccacaatggggccatctgtgaggctgacagggcctcagcacagctggggacacaagcaggcagcagaccctggaagactccatccctggaagtcctgatcaggaggggcaccggcccacccactcagcccagcccagcagggcacctctcccagagccggtcccttctccctctgccccagtaacaaacctttcctcccaggagtgctgagtggcgggggggtggggcagaggaaactccaccctgatttttcattgtttttacagaaaagttagtttctgccaaaaggaaaaaattaaaatgggaacagcctcccccacccctggggaattgttattctcttgattaagccctcgcctggcctggccaccgatgctgtgcctggcaaatcctctctcctccttagctaaagaaggccttcccgcttcctgctcagaaggcccaggccttgttggagtttgaagccaaagcaaaaaagaggcaggaccagtcgacctgggcgtgagcaggaggggcccggagagagggccccagtgcacagccatgacccaggaccacctccggaccccacccacccctctggacacacaagttagggttctgattctgaaaagttgtcattgagtctctgcagcctccaaggctccgtcagtcctaaagtttatcctccctccctctccttggagaaccagcccactcaggctcaccgtgaaagccgctgagctgtgggcgttctattttccctttccggcctcctctgagtcacagtgctgggaggagggggaagccactcttggagatgggccctcttctccccttcttggaaggccctgggggtaactggcttttgatcccctaccccagcctgtgggtggatggctgcaccctgctgtgcccaggccagtgtcccttcccagcctggcccagctcggcacatcctggctccctgcttccctgtcccaggcaggtgatgtcttcaagcatctgtctctgctatttggggaggtcaggtaggggtgggtagggttgacgcctgggccgatagtaagttgaaatgctgggaggagagaacaggagacgttcacccctcccaccacctccagagaaatccaaggcagaagtgaggcaaaggccaacggggctgtatacagggccgaaggggaaggtgcaggtgcgggcactgcccgcagcccattccatttccgggcttgctgactgagctcccactgccagcgcctgcgcctctttctctggccacgagcgcagcagaccagaagtgccagggaagcaacacctgcccccagccaaagcagccctcagtcaaagcccagcagggtttggtgcatgaatgccccaggtccctgggtcctgagggatgagcctccacctgcctcccaaaggttctggcaggactgcgctccagccacctgcagtggtaaccggcttcacagcccactttttgtgtgcaaaggtccttcccttccccggctcatttctcacgcccctgcctgtgcccctgggatcacctcccaaataaactactggaactcaagtatttgagtcagagtctgcttcggagggaatccaaaataagttgggaggggtggcgatgctctagccacctgcttctctgtcctctttcacacaaatgtatcctgcttctttccagatgtccggcttaatgggactggatttatcttcaaaagtcctggtttgcctctgattgaaaaccagtgtgctccccatggttacggacggctgtgcaggtttttgttttgttgaagggaattggctcactctgagtcagccgtgcacccgggctgctgatgtagtctcagtgtgatggttaaactttaagtgtcaatttgactgggctaaggaatgccagacattatttccgggagagtgtgtgacaatgtttccaggagattcgcatttgaatcagtaaagatctgccctcaccaaggtagatgggcatcagtcaatccattgggagccaacagaacacaaaggcagaggaaaagcacattttctctctgctggagcggggacaaccatcttctcccaccctcggacactggacattggagcttctcctgggccgatgccagcacccgcctcctgcccccgcctcgttctcaggtcttcggacccaggctgagttacagcgcaggctttcctggtcatccagcttgcagacagcatttcctgggacttcttggcctccataatcgtatgagccaattcccataataagtcttctcttacatatctgtatatatcctactggttctgtttctctggaaaaccctgactaatacacctgggctccattaccaaaagtactgtctccttaagaaaggagatgagaataactcactctcctccactctggcctgacaccctctagcccaggggtccccagccccgggggactactggacattggagcttcagcaggaagtgagctgtgggtgagcgagtgaaacgtcatctgtatttacagccgctcctgatcactcccattgcccccgagctctgcctcctttcagatcagcagcggcattcaattctcaaaggagcacaatccctattgtgaactgtgcacatgtgagggatctaggttgcacgctccttgtgagaatctaacgcctgatgatctgtcactgtctcccatcacccccagatgggaccatctagttgcaggaaaacaagctcagggctccctctgattctacgttatggtgagttgtatagttatttcatcgtatattacaatgtaataataatagaaataaagtgcacagtcaaagtaatgcgcttaaatcatcccgaaaccatcccctgcccctagtccatggagaaattgtcttccacgaaaatgatccctggtgccaaaaaggttgaggatcactgctctggcctattatttagttttggtaaaaggaggaacaggagagcagagagtaaatcatatcacagggaactaactaggaaggtaaaggttgaaatcaggcttcttgaaaaattattaggactggagaagacaaactcaggaggaacaaaagcctctcttcaagaatgctaggggctgcactgctacaaagaaaacagatgcactcgaggccaggcacggtggctcatgcctgtaatcccagcactttgggaggctgaggtgggtggatcacgaggttaggagtttaagaccagcttgaccagcatggtgaaacctcatctctgctaaaaatacaaaaatcagccaggcgtggtggcacgtgcctgtaatcccagctactcaggaggctgaggcaggagactcacttgaacccaggaggtggagtttgcagtgagccgagatggtgccactgcgctccagcctgggcaacagagcgagactctgtctcaaaaaaaaaaaaaaaaaaagaaatagatgcactctgtgggcctcgtcttagcccatttgtgcttctataagaaaacaccttagactcttcttacagttccggaggttggcaagtccaagatcgaggcactgcgttggtgtctagtgagggctgctgtctctccaagatggcaccttggggctgcaccctcacatggcagaaggtggaagggcaagagagcactcccttcaatctcaggacccatataatagtgctgatgccattcatgaaggtggggccctcatgattcaatcacctcccaaaggacacacctcttaatactcttgcactaggattaagtttcaatgggaatctggaggggatgccatcattcacgagggataaagctaagatgagtgagtgaaagctctaggaatatggattttcagtctcatagctgcctcaagatatcgtcagctgctgttggaaggttgctgaggtcctcatcacaggaggcattcgaatactggaaaactaattttggagaatagcacaagaggactcagttcaagactaagactttggggttttccctggcaggttttaatttggccccatgggtaaaatgatggattactgtctctttgatctgacatgtgataatactcattgaacatcgattcagatgggaggctgagccctgcatgggagaaagagcagaaagctgtgtgggaaggagtgtggtgggaatggtagcagcctcagcctctccgtgttcagcaggtaatcagaccttccccgacagaaggcagctcacctgttaggttgttcccctacctcgctgtctggggaatcccagtcccccattccccctgcccccaccaccccagcagctgattgaaaaaatcttcccactacaaataaggggtccctatagagtctgggatctagcatgttctgctttctgttgcactttggggatcagtctaatgccccagggatgcaatagtgctcctgactctgaagtcaaaggaccttttgctgcctgtcactcaaccataactggagctgactgggctgatctgtccagacagcgctcccaacctccctccctgggtgacctccaaagctgcaccctgttctcaggaggcatcttccccggccagaatctccatgcaaaccccaaggttctgttggaggatactgcagggtggtcacgcctctgagatgactctgcggaccctcccagccctgagatcccacgaggctttcctacctaggcctctggaatgccaggaaaggaaagccaaatgctcagggctcctcacgctcgccccagtccctggcagaagggaagctgccctaagtctcgctggctgcggcagtcctcctggctgctgagtgactcatcagcctcagcagagcctactgtgactggcgtagctcctcccacgcttgccctgaccaccccactgggagaaggttctcagaacagataagaactaagtagcagttactcttggcctctctaaggcagggggacaaaacggaccaggctgaccagaggcaaaaccatggagcaggtgaaggatggtcccagacccctctcttctgccagctcctcccaccctcttgccatccaaagcaaccccattcccaagtgggggagcctctttgagctccttaccccaatcagcccttcctcctacaggggctgcatgcccccaggagccccctctgtccttgcctcccctagccccatttcttcattgccccccttaactggaggcctggaggaagacaagtgtgtcagggaaaatagtgcaagaccttggaataggcaaaaaagatgaatgggtatctatctagcacaccttttgaggttatcttcatttttcattgtctttgagctattttgccactctgcaagttgtaggaaactcataatcatgcaaatggcccttatccatagcaacacaaatgaattgcatccagtggaatgtggttgaatacagcggagtatcctgcagaatgcaattgactgttgccctgttgcgtgtttgtgaattgacttcagcattccttactgcctatgtatgtgaggttctttgaaccagttgtaacattgcactggtatcttccttaattaacaagttaaatgaaatcactggcacgtattcattttatatttgtatgagactcaagatcttaccttttatcaaaattatccactgggtgtgttgactcacacctgtaattcaagcaatctgggaggctgaagtaggagtatctcttcagcccagaagttaggggccagcctgggcaacagagcaagaccccacctctacaaaattagaaagttagccaggcatggtggtacacacctttagtctcagctacttgggaggctgaggcaggaggattgcttgagcccaggagtttgaggctgcagtgagctatggctccaacactgcactctggcctgggccacagagtgaaaccctatctcaaaaaaaaaatttttttttttttgagatggagtctttcactgtcccccgggctggagtgcaatggcgtgatctcagctcactgcaacctccacctcctgggttcaagtgattctcctgcctcagccccctgagtagccaggattacaggcgcttgccaccacgtccagctaattttttgtatttttagtagagacagggtttcactatgttagccaggctggtcttgaactcctgacctcaagatccacccacctcggcctcccaaagtgctgggattacagaggtgagccaccgtgcccagcaaaaaaaaaaaaactttttaaaaaaaattttgaaatgatcctttagcaagcttgaaagaccaccacactaattggtggtctttcaagctctgtgggtaagagctggaggatggagcatttaagggtttctgtatttggaatgtccagcaggaacagggagggaaagggggcagctgtccctgtctaccctcgaccctacattctcctccaagccaactctggccttgcccattttcctttgagaccgactcggaagttcccaggactcggctgggcgtggtgactcacacctataatctcagcactttgggaggccaaggcaggccgatcacttgaggtcaggagttcgagaccagcctggccaacatggtgaaaccgtctttacccaaatacaaaaaaacaaagaagaagttcccaggactctgcctttaaaaactgtcccagaaccgccccacccccaccctgccacccccgccactccgcctgcccatctctgcagttgctgagtaacagtaaggtcttgctgctgctgctgctgctgctgtcacttttcccttgaaatgacttacagcacttacttaataacaagcattaggggattacatgtccaacacatgctttcggggtcacattcaaaccgtagctgggatgatagctaaaaggcacaaggacttgggttttttccaaggtgatgaaattctccaaagttgacttaagtgatgattgcacatatctgtgaatatgccaagaaccacctgccaaaaacacaacaggtgagtcacatggtgacttcatttgccagggctactataacagaatacaacagactgggtgccttcaaccacagaaacctatttcctcacagttctgggggctggaagtctaagagaaggtgtcagcagggttggtttcttcttttgtttttttttttgagatgaggtctcactctgtctcactggcagtggtgtgatcatggctcactgcagcctcctgctcccaggctcaagcgattctcccacctcagccccccgagtagctgggactacaggtgtgtgccaccacagctggctaatttttgtactttttgtagagatggggttttgccatattgcccaggctggtcttgaattcctgggctcaagcgatcctcccgcctcagcctcccaaatgactgggattatgggcatgagccactgtgcccggcccacagggtcagtttcttctgaggcctctggccctgagttgcagatggccaccttctcctggtgcctggtgtcacagggtccttcctctgcctgtgggcatctctgctgtttctgtatgagtccaaatctccttctctcaggagaacatcaattgttagattggagcccatcctaacaggctcattttaacttaatcacctctttaaaggtctatttccaaatacagtcacattttgagggactggggatgagggcctcaacataaattttggaaggacacagtttaggccatatgaattatatctcaatgcaactgtgttttagaaaatgagcgaaagatccccacagcttttgtcaaacagggggctcttattcctctccaagggaggccaccatttaacttcctcccatatttctccggaatcaaaggtgactgtctcagcttcccctaacctcaaatgggcaggccaggccacaggcagaggttgatggtttggagtctagcagacctggcttttgcacctggtgggacaggtggactctctgggcttgaagcatctctaggagcctcaacccctgcaaggagccaggtgtccctccaaacatccacgaggaaatctaacctggctcgctgacatgtaccaggctctgttaggggaggtacaaagggaggcgactggaggcgagtccccacaaagtaacctgtgccctgccttcgggggtatcaccagggtggtcgttggccccgacctcaggcggctcatagcctggccaggaccaccccactcaaacctgaacccaggcctaagggtgggtgggagagctggggggactggagactgagctccctcatccactctctttccccagcaccacaagggctccacacagatgacctgaacacagaacaaatggggctcaccatggcagccgccagcagtgggtgtctgaggcaggccctggagggccagctccctctcccaaggcacaccgcccaccaggctgcctgttggagcctgtagcccctgccgatgcatcggaagggcgatgcctccaagatttcgggccgtctctccttctgttgtgaattgctctcctgtgtgctcctggcaggcctggcaccttcaaagcattctgtggatattaactaattagtgtaaacactgcaatgcagtgatgacctattaggaggctgttgttggtatcagatgattaaaggtggtgaaagcctccccgacagctcttctgggactcagctccaacttttctccctgcaagcctggtctcatggcctggagaagcataatgaggtcagagtctggtgaattcagagtaggtaagaaaacgcagtgcctgctgcctccgccagctaacccaaagaatctgtggcaatggctgctcaagaagaaatcttggcctggactacaggagacaagaagtttggactcacgtgtgaccaaaggatctgggactcccagtgtccataggtcagcgcacaactagtgccaaggaggaccctaaaaggagagccatgcggcggggagggtcacaggagccagggggctggctgctgggccctgctgggacactgaccggctccctgatctctggaaagtcacctcattcattcattcaacaaactctccaaagcattaaaaacatagatacctgcattcttgtctcatcagcaaatcacggcactcttgccttctaaatttatccagaatcagccacttcttaccttccccaaatatcatcatgcgatgactccagtagcctcccaacagctccccatgcttcccctagccccccgtcccccgcagtgtcggaacacatcgagtgtcaacacagcaacctctttggctcagaaaaccccagcggccttcatcctcatcagaggaagcacacaaccctcacaacttccttctctcactcccaacaggccttcttgccttcctccacggcacccagcgcattctgctttagggccttgacacttgcagttccctgtgccttgagccgtctcccgccagaaaccgtttggctcgcttcttcaccttccccaagaggtcttccctgtccacaccatctaaacagcgatcagcaaactttttctggaaagggccagaatgtaaacattttcagctttgcaagccgggcagtctccgcagcaactcttcaactccaaggcagtcctcggccacacatgcatggaggaagagcgctgtattccaataaaactttatttataaacactggctaccatggactgatttgacccagggaccgttgtttgccaacagctgatctaaaaaatcaactcaccattccctcctctctcctcagctcagttgttcttggtggtatgcattgacatgtgatatgtagacaattgtctacctctttgtcacctgcctctgccactggaacatcagcttcacaagaacaaggactcggtctattttgcttattgctgtatctctaaatcctcagacagtgtctggcatacaatcagcactcgtattaaaaataaatacaagccacacattatgcatcggggaggaggccacccactggcttctacaaagatctgggttctgtaacgaaatcttttcagcgtgggtttctctaaggagcaagcaggaagaacaggtatgaggagcaagaccttcagaccagcccactgcctggagactttggactcaaatgaaaagcactgtctgagccttgtttggaaaggaaactctccagtgtctgagcctcataatcaaccagcaggaatgcttgtgacatttcacaacaaataataacaatttcttacctccgtgggcttcctaagaggcagtcatactggctcatttgacttgcacatacctgtgagtgggtaagttctatattttaccgatgaggtacacaaagcgcagatagccttgcccaaggtcacaccgggaggaagcagccggagccagcccagaatccaggcttccagcttccaccgcagtgctgctctgacacatcctccttacaggccagcctcctgtttccccgatgcataagccagtgctaacgccacatatcacttaacagatattcgccgagtccctatgttatgcaagaaactgaactaagtgcaatgcaggaggtaaagatactcaagtaagtcctggtggtaaagagactctacaggagagccagtctgaccttccaaggcaggaatctccttctcggcatcgcatgctggttattcctgtaaaccgaagtcatcacaaacttaaaacaacagcttaaaacagcagcttaaaacaacacgcatttgttatctcacagtttctgtgggtcaggagtctgggtgtggcttagctgggccctctgcttcagggtctcatctaaaagctatagccaagatcagagctgcaggcttctctgaggctcaaccgaggaaggatctgcttcccagctcccatggatggtcgcagcattcagttgcttgtggcttcttaaatggaaagcctcactttcttgctggctattggccagaggtcaccatcatgtcatgcattggacagaggctgctgtcagctccttgctttgtgggcctccccagtgtggccacttactccatcaaggccagcaagagagtctctcagcaagacagatgtcacaatcttatgaaatcacaagagtgacatcccgtcactttgctgtattctcttgcaacgttaaaggcaagtcacaggtgctgcttgcactgaaggcgagaggactgcataaggccgtgaacaccagcaggtaggaccgtggggccagcatccaccctgtccacctcatctgctaggtcttccaactctccctgaacatcttcagagacacactgaccactccctcacaaggcagctcattccattctgatgtcacttgaatggttagaaagttcttcctagcctcaaacccaaatccatctccctatggcttttaatcattgttccaagccctgcagtctggagtgacatagaaaaattctaatctgggccaggcacggtggctcacccctgtattcccaacactttgggaggccaaggcgggcagatcactcgagttcaggagttcaacaccagcctggccaatatggtgaaactctatctctactaaaaatacaaaaaaattagctgggcatggtggcacatgcctatagtcccagctactcgagatgctgaggtggaagaatctcttgaacccaggaggtggaggttgcagtgagtcgagatcacaccactgcactccagcctgggtgacacagtgagactccatctcaagaaaaaaaaaaaaagaaaaattctaatctggcagaagttggactccaggagggcagggatttgctgtatcctcttagaagagggttgttggaaagttccaggcacatcaaagatattccataattacatgtcgagaatagagaacagagtggttcaagaagttgtctcagcagcttattcgctgctttcaaatgcagagttggccttgtatgggaacttgcttaccctgtgtctcgggggacagaccttcatagccttccttgggagaccggcactttaagaggctctattccaaccctgacacatgacttgctcaaggtcacatagctggtaaatggcaggtgtcagaagccaggcctcttgactgccagcatttctctgcctctctatctttgtgtgtgactgaatgtgagacagggacaccagacaggcctagaccctgcatcctgggagtttgcaactcaaagatatttcctctactttctgtgaactgccttgatccctggccagcaaactagatgtggtatcctcaaagccagacacaggtgagcagcgggcctctgcgggctgcagcagggatccaggtagtcatttcctgctttcacttaggactgctgtgcacctgctctccttctcccaccaggaataaccacacccagtgtacctcctagggtgtcggggcctccccagcactgagtgcccagcctagttcagcctccaggcttccagtttcctggcagtcaagtccatttgctctggagctttgcaaggggcccccaggtccttcatcactgcacctgcagctgcagtataggccttgacccatggcgaattcagcaagggttgaatggatgatttgagtccacaggatctgaagaccttggctgggaatgtcagaggcgaggcacagcctgcctgagcccagtgagaggagaggcagagcatctacagggcttcaggaggcccctgctgcaaccctgcctgcaagtgagtgagtcggctggagctgaggctgagtttcaagttctagggaaatggaaaggccacgagaagaagtaggacccgaaagaaactttcccttcttggaaacgtccgtgtcgccattatccccaacaacttccttttcacctccctgcctctaagggaccctcccaccatcagctttctcctctttatcctgtgcctccaacttcccccttccatggctgctacataataagcattcaataaatatgagtcattaaatagtcactgctgttcctgcctcttccccctctctatattaacacattcagtgttctatcacctaagaaaactaaaaccttccaaaatgtttcccacatgtggtcggctattgatgatttttatttctgcctttgcatttttacatgtcagaggtctctaccatgcacatgtgtctaagaggattacaatgaataagagctgacattggctgagcaggaactctgggccgtccccggtgctaggagtttcctatgcaccctattggttcagcctctcgacaatcccatgtagggttaccaactgtcccagatggcccaggcctgaggggcttcctgggacaagagacttctattgcaaaaactgggataatctcaggcaaaccaggagggttggccaccttccaccaaggaggcgctatcatgatccccattttatagatgagaaaattgaggctcaaagaggcttaaaactctccctcggggccaggcacggtggctcatgcttgtaatcccagcactttgggaggccaaggcgggcagatcacttgaggttgggagtttgagactagcctggccaacatggtgaaaccccgtctctaccaaaaaatacaaaaattagccagctgtggtggcacatgcctgtagtcctggctacttgggaggctgaggcacgagaattgcttgaacccaggaggcggaggttgcagtgagctgagatcgcaccactgcactccagcctgggtgacaaagtgagactgtctcaaaaaaaaaaaaaaaaaacctgcctgggaatctgatcaaaaaaggggcaagcaaaggacgtaagtagacatttctccagagaagacataccagtggccaagaagcccacgaaaagacgctcaccagcattagtcatcaggcaaatgcaaatcaaaaccacaatgaggttgaggtgccacttcacacgctcgacaacagctataattttgttttaaaactgaaaataagcgttggtgaggttatagagaaattagaacacttacacattgctggtggaaatgtaaaatgtttcagccactgtggaaaacaatttggtgattcctcaaaaagttaatcataaaattgctatataatccacaattccactcctatgaatatagccagaaaaacctgaaaatagacactcaaacaaatacatgtgcacacacgttcatagcagcattattcatgccagccaaaaggtggaaacaacccagatgtccatcaaacaatgaatggacaaatgaattttggtccatccatacaccggaatatgattccttaaagaggaatgaagctcttagatgaatgaagcctaagaacataaagctcagtgagagaggccacaggccacaggcaaaagctcccatttaacctgattgcattttttttttttttttttttgagatggagtcagtgtcattctatcactcaggctggagtgcagcggcacgatctcggctcactgcaacctctgcctcccaggttcaagccattctgcgtgagcctcccaagtagctgggattacaggcattcgccaccacctccagctaatttttgtatgttttagtagagagggggcttcaccgtgttggccaggctggtcttgaactcctgatctcaggtgatccgcccgcctcagcctcccaaagtactgattacatttttattaattgttcagaggaggcaatgcatgcaaacaacgcagattggtggcttccaggggctggaggaggaggaaggaggactgactgccactgggtacgaggtttcctcttgggtgatgccaaggtttgggaacttgcagaagtagtggctgcacaacattgaatatactaaatgccaggaattgtacacttaaaaacggctcattttgagctgtgagcttcaccttgatttaccaaaaacaacaaaaacaaaacctgtacttcaggtcacacaactgatgaacacagagccggccccggagcataggacacccaccagcccgccttccgtgaccgctggagcctgtgtcgctgctagtcccccctagctcaggcctgcctccccatgcttctccaaaggctctctctacttgtccactcgccatttgcttgtcaccggggtcaggcttccccgaccaccaccctgtgctggtcacccaccctcttccactgggcaagtccagtgaacggcactggggggtatttgccattctccccaccagactgctgcaaactgcctcataaaattactcagaaaaacccagggaggccaagcatggtggctcgcacctgtaatcccagcactttgggaggccaatgtgggcagatcactgaggtcaggagttcgagaccagcctggccaacatggcgaaaccccgtctctactaaaaacacaaaaattagctgggtgtggtgacggacccctgtaatcccagctactcaggaggctgaggtgggagaatcacttcaacccaggaggtggaggttgcagtgagccgagattgtgccactgcactccagcctgggtggcagagcgagaccccatctcacaaaaaaaaaaaaaaaaaaaaaaaaaagagagagagagagagagagagaaccgaagggaaaggaagaaaagaaaagataagaaaaacccagggaggacaagacccaagcagccaagcaggtcacctcctgaggccgctgctttgcccctctaaggacgtctcagggctatgtcttcctatgcccccccttttcctctcagtcagcccccacctcacgggcctgccctgcagggtgtcggggggctcttccttcttgtttttctagccttcgctcagctcagtcagtcggagcctgaccgtgggggcagctcctctctggggccggagaatcattcctgtctcctgtcgaaatgacccttggtaggaaggtaagttcactgtccccagaaggcctgcgggaagaggcactgcattttactcagagcccctggcagctggggagctgaggaggggccgtctgtctcctctgtctgtcaagacacactagagaaacaggtggggagagaatccgcagagctgcccgcaggtggccccctgggtgggactgggcctctctgcttcccggggctgcagggaaggtgtcacaggctaagggtggactctggacacggctgcagctctcaccattcagctgtggggtctctcttcgcacctccatcccgagggtcagggaaggactgggcggaaaaaagccaagaagctggtctcatccacagacacatggggcttcaaggtggaggagccccagcccagtggggtggacaaggtgccggggactgcatagtgaccgtcagggcagccatcagctcctcctatgaaaccccacaggggtggctggcacttgtcaccctgaagaggctgcaattccctcgcacaggtcatcttggaacaggcaaattcattatagacccctggggtcaggagggggctcagtacagtcccagaaggttccatgaaagccagaagtagtgccctcagcttcagccaggaccctcctgcctgcacatttgttgaccacccagggcctgggtgctcctgcctccggccccctttccccaccgtgaatccatatggtcccttctttcccagcacagccacaggacagctctgtcacaccctccccagtgacctaccatgagccacctgggccgactggccctccttccccacagagcccctggcacccaggacttcctggcaggtgctggccctgaagtcctgggcttcctctgggctcctatgtgaagccagcgccctggaggccaggtgtttcctgtgggtgggggggcctggaaggttctaccacactcacattccacctcctcctctggggcctcccacttgtggctcaggccctgctactgttaatcagagggaagagagaaggccctggggatggggtgtgtgaaggcctggactgtctaccgcaggctgggcatggggtggggaagtctcagggtagcagcaaggcaggaaggggaggaacacccagagcttgggggcagagataagtaaggagcccccagttccaggcaacctgtgggtgtggcctctggggaccagccagacagcctggcatggacagcctcactcttctcactgctttgcaaatgccacaggtggtcaagcacccacgtggtcttcacacatctgcaccttgcaggtccaggatggagctgtgatcatcgctggatgggaaagcagcttcctgtctccctctcagcaagtggagtgcagtggggtgggcagctgcttgctgcagactcactcctatccccaaagaagccttgagaggaggccctaccatatggggagactgaagatctgaaaggcccagcttgcccaaggaactcagccagtgagtggcagagcctcctcccgtcccaaaactctgcctctggccacccccaagcactgcccctctgatggcatcagggacgcgataaagaaacctcaggcagggccggccgagagcccttctcccaggcttgcctccagctgtgcaggaagcccacctgcccaagactcacctgcggcatttggcgaaaagcagtcctgggctcccaccctccccggcctacttgaacaggatctcgaggggtggacccaggactctgcccaagactgttgagtccctccctccccggtctttgaggtggcaaggcttccccttttgcctccactcccctgttcctgccacagcagcctcctaggactgtgttgctcttttcctttgagttggtctggctctgcaggggtcacccaggccccaggctctcagtgggtggggatctgatgtagcactgacatgtttcatccacttgactggcaggtcaaggacagcctggaggtgggcaagtcatcaggaccccagaccaggaacgatggaggctccaaagtccaccagtagagggaagaaaatagccgctgtccccaggcagagccaccagtcacacagggacgagatctcagaatgagcactgggcagggttctctgggatgctgagctctggtcttccctgtgagcggccttggacaagtcatctgcccagaccctccataccccgtgctgtgtcttctcagagagtgagcgttcggaagcatggcgctctctgaagtccgtggctgggatgtccatggctgtgacgaccttctgaaaaccatgtggtctctgtcccactttcagcctcacagtgcacgaatgcaagcccggagtaagcgcccccaactgggctcaagaccttcttcttgggggtccctgttgcatcagcttcttttaagttaactttctcttgcagtacagtatgaataaagaaaagtctaacactatgtgtccaactccatttggactttcacaaagtgagtaccttcatgtcctcagctctcagatcaagaagaaaatactgccagctcccgagtcctcttctacctcttcctgtcattaatacccccaagacaacgacgaccttgactactaacgccagaggttaatctggcctcctttggaattacacgacaggtacgctcttgcatctggcctctctcctcccacgtggagtctgagcctcaccacatgacgtcatagctccttcctctcactgctgtagcccagcccatctcatgaacaaagcaccatccatatatccatatgcctctgtggatggatgcttggctcggttttcagtctgggctattacggtgctgtcatgagcagtctcctggtgaacatttgcacacgtttcctttgcgaaatgcctgggaagggaattactgggctgttgggtggacatgtgtttggctgcagtaggtcctgccagctttctcaagtggtcgtaccaattcaccctccctccaccattgtgggaggccccaagctgcccctcggcaccaacatctgggatgtctttttcttttgaaccactctcttggattcggtgtaatgctgtgattgtaatttgtatttctgtgatgactaatgtggttgagcacctttttctacgccatcaccttctttttttactttgggtttttaatagacacataataattgtacgtatttatggggtatatgtgatatattggtacatgcatacaatctgtaatgatcaaattgggattttaggacatgtatcccttcaaacatttaccatttccttttgttaggaacattctgaatcttctagctattttgaaatacactacaaattattgatatccatagtcaccctaccatgctattgaacactagaacacattccttctatctaactgtatttttgtacccattaaccaacctctcttcatcttctttccaactccctacccttcccagcctctgggaaccactgttctactctctactgccatgagatccatttttttagctcccacatataagaacatgcagtatctgtctttctgtgcctggctaatttcacttaatattatgacctccggttccatccatgttgctgcacatgataggatttcattcttttcgtggctgaataatattccactgggcatatgaaccacatttcccttatccagcgtccttgatgaacactgaggttgatctcatctcttggctaccgtgaatagtgctgcagtaaacgtgggggctcagctgtcctttcatactgaagttctttatatattccgggcactaaacatagacatagatatgagtatagacatagatatggatatggatatagatatggatatggatatagatatggatatagacatggatatagatatggatagattggaaatggatatggatgtggatatagatatagatgtggatatggatatagatatggatgtagatattgataaggatatagatatggatagattggatatggatatagatgtggatatggctatagatgtggatacggatatagatatggataggttgaatatggatatggatatagatatggatatggatatagacatggatatagatatggatagattgaaaatggatatggatgtggatatggatatagatgtggatatggatatagatatggatgtagatattgataaggatatagatatggatatagatatagatatggatatagatatggatagattggatatggatatagatgtgaatatggatatagatgtggatatggatatagatatggatgtagatattgataaggatatagatatggatatagatatggatatagatatggatagattggatatggatatagatgtgaatatggatatagatgtggatatggatgtagatatggatgtagatattgataaggatatagatatggatatagatatggatagattggatatggatatagatgtggatatagatatagatatggatatagatatggatagattggatatggatatagatgtggatatggatatagatatggataggttgaatatggatatggatatagatatggatatagacatggatatagatatggatagattggaaatggatatggatgtggatatggatatagatatggatgtagatattgataaggatatagatatggatatagatatggatagattagatatggatatagatgtggatatggctatagatgtggatatggatatagatatggataggttgaatatggatatggatatagatatggatatggatatagacatggatatagatatggatagattggaaatggatatggatgtggatatggatatggatgtggatatggatatagatatggatgtagatattgataaggatatagatatggatatagatatagatatggatatagatatggatatagatatggatagattggatatggatatagatgtgaatatggatatagatgtggatatggatatagatatggatgtagatattgataaggatatggatatggatatagatatagatatggatatagatatggatagattggatatggatatagatgtggatatagatatagatatggatatagatatggatagattggctatggatatagatgtggatatagatatagatatggatatagatgtggatatagatatagatatggatatagatatggatatggatgtggatatagatatggatatggatgtggatatagctatggttgtggatatagatataaatatgtatagactggatatggatatggatgtagatatggatatggatatggatataaatatggatacggacatagacatatcatagatatggatgtggattacaaatgccctctcagactctctcaaggtgaggcttctcctttattcagttaatgcagtgacttacactgataggctctccattattaaaccacctctcccttcctggaataaactcaacttggttgtgacgtgttcactttctgcatgttgtttggttggagttgccagtgtttgtcttaggacgattgcactcatattcatgagtgaggcccacctgtaattttcttttcttttctcaacgtttcggtcggaaggtctgtgtatcagggttaaactgcctcataaaaggagccgagaggcatccctccttctctgttctctgtgagcatcagtgcaaggtgggtttgatggacacgtttgttgtcgatttggggaaaggcccacacggctcatctctgtcaggccaggggaccatgtctgggggtcaggcgtcagtggccttgtctatgttctcatggggtaggagcatggggagtggggagaacttggattgccacatgacaaaagcccctgaaatgggcttgaacaggaggacaggggctgcagccagggcctctgccttctcctccgtgttccttctcagctctctctgttcctccagggcctcccgccatcctcctgcccactgtcctgctttcctcctgttccatctgggcccctcttcttctgtctccacctctctctgagccaggactatccatagacccctcctgatgccgtgcatgcgtatgtgtgtgtttatgtgtctgtgtgtgttcgtgtgtgcttgtgtgcatgcttgtgtgtctgtgtgtgcatgtgtttgtgtgtgtgtgcatgtgtgtgtgcatgtgtgtatgtgtgcctgtgcatctgtgtgtgtctgtgtgtgtgtgtttaggtgtgtgtatgtgtttgtgtgtgtgcgtgtgtgtgtgcatgtgtttatgtgtgcatatgcatctgtgtgtctgtgcatgtgagtgtgtctgtgtgtttatgtatgtgtgtgcatgtttgtgcatgcatgtgtgtgcgtttatgtgtgcatgtgcatctgtgtgtgtctgtgtgtttatgtgtgtgtgtttgtgtgtttctgtgcgttctgtgtgtgtttgtgtgtgcatgcgtttgtgtgtgtgtgcatatgtttgtgtgtgtttatgtgtgtgtgtttatgtgtgtttgcgagtttcatgtgtttgtgtttgcgagcatgtgtttgtgttctgtgtatgtgtgtgtgttttgtgtgtgtgcatgtgtttatgtgtgtttatttgtatatgtgtttatgtgtgtgcacaagcgtgtgtttgtgtgtttgtgtgtgtgtttttgtgtgtgtgcgcttccgctcacatgcatgtgtgtgcacacggccagcagcagtgcccactgctgggagattccgcctgcttcttgaagctgccctggtccttcaccagctgaggctgggactcaggtctgtgcctcctccgcgacctctctcaggcccccacccccaccttcgccacctctgcctgctctgtttcccgaccctgctgctggagcacgcagccctgcagtgaccccgtcgcatatgcttgaacaatattctagagcaccatgaaagactcaggagggtaaagcactagcgcatgtgccgactgagctcccggctggtggaggcagagaggcggcagggcagagccgcggcgtgggcaggagctggggtggaggggggccctgcaccgcgggcagcctggctcctgccctggtcacacagagggagtgcctcacctccgtgcccccaagcccagagtgctgctgccaaggcgaggcgaggaggagggcgccctgtggctgacaatcaggcgagtgttccctgcgagcagacacagcacctaaatcatgcatggcccaggccaggtgctgactgggccgcccaggagggggttgcccactgcctttttcagggattgttcccttaatgacacctaaaaatgagcaggcaagcatgggcattcagccgaacgcccgcccttgcctgatagaaatgcagctgtctggtctcaaagctgtgccatcgacgctctgggaatggggccttagggaaggacctagccacacccgtgccagatcagccagctgtgatgatggctgacgctccctgatggaggagtcccccagactccaaacgttcccagccaagccctggcctcggagcctccctgtcaagcctctggctggccctttccaggaactggacccaaagcccaggccacacctgccacatcatcagcatgaccctggctggcctgggcagaagagacaggcgaaggtaagagtccagcgagaagggccatggcctgccctggcgagggccgtcctcttccactggcccacatctctggtctaagacccccagccctcctgggagaggaaacaccagggagcccagcaacccggattggagcccagggttggagcccggaattggagtctgcggatctctggtccaggccctgcagctgcctcacaccatgcccctgggtacatcccttccctcgctaggccccatggccctctcctcaaaggaacagattattccaggtgacaaggactgtccccaccccaacagtctacagctccatgggacctgggctcaatgaagccaatgtgtggccctggagatccccgggctgcgaggggtggtgggacgagccctcttcagtcctggagaagtgtccccgtgggctttctcccagccagggcttttgtgggttctcagcagaagttgtgttcattgttatcatacatcgcaataacgaaaataatagtaacatcctaatcataggctcctgggcaagatggtggctgccttaaaggactctttaacaaccgggagaggaactttctcagaaactaaagaagctccccaggcttggggctgcagggaagtgactgaggggaaaaggcctgcaaccccagccataacccttggccgcaggtgggcaccctctgcaggggggcaacatcgacaggaacatttcctgtcccagggcttggctctgaagcccagagagcctgccctggccaaggctcactcgtagaagcagcagaatctccaagacaatcttcttccccctgcacctgcaggagcccctcccctggcctctgctgcaggcaccttatttcaaaagagatcctagcaagctgagttcacccagttggtgccgaggagaggagagggaggtaaggacagggagggaaaggagaaggcgctgggagagctttgcctgcaaggaagggaaccccagcttcagccagggggtggggcggagcagtgccctggggcagagatgcgctggccctgagggagggtagctgcggagctagcaaaggcccgacacccaggcactgccccttctcccacccccaccctccactcccgcccccctcagcagaaggtggctgccttcagcaacttccccctgggaccgccctcacccaatggctgggtcataacagtggtcccaaagagaacggagttgatgggccgatctgggcccagttcctgggcagttgtggccggggtggtgggggaggtcccacagaaccaacatgggttaagggggtggtagttaaaacgtgggcccccagcactatgggaggctgggccatcaccctcaaaggtgcctgcctgctatgtagtacatcctgttaataggaggtgtggaaggcagagctggttgagtttgatctaagaaacaaaaagatttataggggtggtgtttggccttcagaaacttggacagcagccaagggagggatgagatgagttctgtggccccagaaccctgggcgcagtggtggcacatcgggaagcaggagcaggctttagcctgacagcaggaacctgctaggaactaacagagccgatgggcagggaaaggccacctcgtcaaggagtgagccctgcagtgctgcgaatacctgggtggactcacatccacctgccagggacagggtagagcgaggtccaatgcggcctctaaggccctcctgacacagccccaggatcctccaggggttcctccctgtcctcatgggcctgttcacctcggcagcctcctcgatgccacggctccctctgtgtcctccctctagacgctcaggaccccataggccacattctctcctttcccgggcttggcacctgcagatgtctctgccatcccctactcatccttcacttctcgtcatgagcatcagctcttccaggaagatgagaaccgcctctcccttatcataaggaactctcgtgcttgtttgaaagcctgtgtcccctgtggactttcagcatcacaagggcagggaccacctcagcccggtttgcctctccatcctggaggagatcacagggcctggcgcacagcaagtgtttaagaagtaggtgctgaatgaatgaatgagtgaataatgtcaaagggacagtcaacgggcctcccaacacggtacccatgggcctctctagagacactgacatcccagggactcttcctgggggtccaggttaggaagataagcccagctaggggaacctctaagaggtgagggttgatgaagactagaggcagctgatggggttgaggtgaggcaaggtgcgactggcattcagggagccaacagaacgtgtcattttcttgttggtttcacccctctctttatttatatgtacaccccacttcttctctggaagcatcagggagtcgggaggtacggattccagttctgggtctgttcttgggaagccctaatgtaatgacttcccctcttgggacctcaattttctcaactttgaacttcaccacttgggccggataatttctcaaccttatatccgtggctggcatatgtcctggggtccgaaggccgggtgagcactcccagagcctaagtctgaatcggacttctggtttccccatggccacccagccagtgggacagaagccaccagaaaaagaggcctcttcatccaggtgcggtggatcctgcctataatcccagcactgtgggaggctgacacaggcagatcacttgaggtcaggagttcaagaccagcctgaccaacatgggaaaaccccgtctctactaaaaatacaaaaaacttagccaggcgtggtggcacttacctgtaatcccagctacttgggaggctgaggcaggagaattgcttgaagccaggaggcagaggttgctgtgagccaagatcacgccactgtactccagtctgggcaacagagcgagactccgtctcaaaaaagaaaaaaaaaattaaaaaaacaaaaacaaataaccttttcccagttcatgtccaggaggtcagcatggctccccagctgcccctcctccccagagtcaggaaggtgagaaacgcagcactgcaggcgcctggctccagggtggagtgtgggtgtgggtgggcttgctggagcccccgctttcctccatcacaggcagtgcgacccagtggtttggtgcagttgctcgtgccaggcccccggggcctgactcccacctctgctgtgtattagccctgcgggtgtggggctgatgccgtgtcttgcatgcaaggtcttagaaacggtctccaggagaccaggctactcccatgcagcagacggcagggagaactgaacctggctgttctacaagccgcacagcgtgtgtgcacaccagacttttgatttgtaatgagttttacccatatcttgaattgcaaaacgcatctcccacctccttcctccttgtggggccacctttcttgggtcactttggagggcactgtgctgagactaagatgcatctcctcacccctacgacctcacttcctttcgtggggtgactgacgtgtgcacacatcaccagaggacctggcaaactctgaggaagccttgttgggggctggggagggggtgttggtgatggtgggggatggacgggagctttgcagagaaggggcttttgaggtccctgggtcccagctgggctgagctgaggtgcaaaagtcttcctgcatctgttttcttaggtcctgtttacaaggaggctgagtagacttccaggaggagaacgtgggccacgtctggacctggctaggggcacccacgggcacatctgtgaagactggagaacacgatgccagggagggatggggcccctgaggggaggattctggttccctgagataatggagtcacagggctcaaggacaagtacctgcaccctctcggcctgtcctggaaagaaaagtgatgagtgtggggccaggtgagcctcctgcactcctccctgctgtcctccagagctcaggcagcctaggatggggcccccaagaccacagaacagcgaggggtggatggtttccccatccctccaaagaaatcaggcaaggattgaggtccaggccacccattatgacaccaaggtggcagccaggagtgatgggaagaggtcagggctgaccatcaagggcatgtgagggcccccagtggatggtggaaggggagagaacacaaactgactgaggcccaggttctgcgctaacacagataaagataaacacacctgcacagttggctgtacacgtgactgtgactcatccccaaaggcttggaagactgggggcgtttgatctgcataacataacttgcctaacataaacataatttcagtgggctgacatgtgaaggaagggaattacatgtggaggatagatttcaaggtctgatagatttcaaggtccaatagattcccaaggactccatctttttcaagccaatctggatgaatagctacttggtgtggtgggttaaaaatggctgccaagtcttggactctcctcttattgagaggtgatgtctaattgtcttccaggcagcggacacaggcagaagccagaaggcttttccaccctcacctcagcagtcgcaaagtatcacttccactgctttctatcactcaagcaaatcacttacccctcatccattcatccactcattcaaccatccctccattcttccatcacccctcccatctgcccacccactcatttatccatccaaccacctgtccacccatccacccacccacccacccctcatccaactatccagtcatccaaccattcattcatttttccactacatcttccgttcacccacccactcatctatccatgcaactatccattcacccatccttccacccatccattcatccatctatccattcaaacatcaacccacccatctacccactcaccaaccacccatcaatccaaacacctatccacacacccactcacccatctatctatccatccacccatccatccacccatccacccatccacccatccatccatccatccacccatccatccatccatccttccacccatccatccatccttccatccacccatccacccatccatccatccacccatccacccatccatccatccacccatccatccatccatccatccttccatccatccatccttccatccaaccaaccatacatccatccagtccataagctgtgactttggagagccatgggtatgaatcctttcctgatggcactcacccccagtggggagagtgacacacaaatacacgggccaagtaactgcaaactgtgagacatgcttgaagaaaaagaaccaggagctgtgagggaaaacattacgggagctcatctagatggggtgggaggaacggccagctgcttggaagtatctggatgctaacacggcacacagtaaaatccaaactgtaacctcctttattggagtgtttgtatgatcctgaaatcattcaacaaatggtctgcaagacccaaagtccaactccagctcactagcaactttcaaaaggctgaaaccagcagtgcaagcccagtctgtctcccctgggcaagcagccatgctgctggccacaggcagcctccccgggctcaagggagagccagcagtcgagaccccaccagagcctcctttgcctgcagttgcgtcatgagctgagccccctgtgccagcagggaggcaggaaaaggagaccttggaagagagggagagggaggcaggacaagctctgcttcccattccccagggaggccagaatgctaatgtctgcacttaacccaaatctaagcccagaagggaatgacaaattgaaagtctgtcgtgattcccagccttctgtgttttctgttttggaatctaggaggaaactggcaaatgccagagtggtcccgtggtacaaagccccagcaccaccaccacgccttcctcttgggtacctccatccagaaagagcccctcaagaacttagcttgctggatcagtggtaccagtcagccctgggcagaatcggtcagactccccagggcccctgtcacccccaatgcctggtcagcactgtcctgttctttcccctagcccagcaccagctgcagccatctcccctcagaatggctggtgggatccccccagcaatctctcccaccccaccccacattggcacctccagttctcagcctggactaattacaatctttgatgagcaaaagatactcatgatggagaccttcacctgaaacaggggtggccagcatctgacgccgtgttctgcttggctgtgccatctgcttctgggcaatggactcttgaggaactagcctcattgtggagcccattgaggtggcggggggggcggggggttactgcagaccctctcccttcctccttctgtcttgttggcatcacagtcaacctccatcagagtctctctgttcgttgtcctatctgtttctgtcttctctcattgatatccaaggggatggggaagcaggagctggccacattattgaatatagaatgtagatctggaagggacaagggcatgtgggcctgacccctgggaggctacagagtcttaatgcacagaccaggatccacacacccatcctgcatgtgtagcctgaataaataatgcccatctcagggttatttttcaaatgtatatgcatgcagttgcaaataatcaaatacaaattgattttaaaccactactgaattcaaagtagctttttgtcattgtgagttttctcaaccaatggaacctaaaaataaaagtgccggcacgtgaagagatcctcgaagggttggcattaaaatgcagttcacgggcttgaaacgatgaagagccacaattccatggcaaatccttcttttttgataaagaaattgctgttcagagcagttaaaagccttggccaaggtcacacagcttgtgacagtggtagaacccgaactctcccaggctctgacctcagatcagagcaattaccttaattcctctgaatttccacttcctcttctgtaaaatgggattgttgagagaattaaacgaaagaatctgggcctggtgtttggtgtgatgccagcacacggtaggcactcagtaagtgatgaccatcccattatttttctcattatcgcgattatgtcctgttgcctcatgcattctccgtttgcttctaaggcaactcacactggtgaagtacttgcccacacacatacaatggagttgggtaggcaacgcggtcagatagcacagtcccctttagcgctatcccaccgtgaccagcacgcaggagttgagaagcaaatgcccctcagcatggagcccttgcactgagctcccacagagctggcacttttcctcctacagctctgctctctcagaattgtctttgcctggatctgtgtcctacatcaaagagcaagcaaagtggggatgggaaccaggtgaacacttcaccaggtagcatcaatgctttacagaacaatcaatcaattggtcaatgggtggatggacgggcagatgaatgaataaatgggtgaaaggtggatggatggatggatggatggatggatggatgaatggatggatggatggatgaatggatggaggatgggtgggtgaatggatggatgggtgaatgagtggaggatgggtgggtgggtagatgaaagaaaggaaggaaatacagatagatgagtagatggataaatggacagattgatgagtgggtggatggacagaaggaaggaagagaagaaagagtggatgggtggatggatgaacaggttaatgaatggatgagtggatagaaggaagggaggaagaaaatatggattgatagatgggtgggtagatgggtcaatgggtggatgaatgaatgggtgtgtgagtagaaggaaggaaggaaatatggatgaatagatggatcggtgggtaaatgggtggagatgggtggctggatggaaggaaggatggaagaaaacatggaaggatgtccatttgtaaatgaataaaaggacagatggatggatgagtgggttaatggatagaaggaaggaaggaaagatggatggatggatggatggatggatggatggatggacagatgaatgaatgggtggacggatagaagcaaggaagggcatatggatgggtggatggaccctttgctcaagatactccctggaactgcagagaaaggggttaagcaagagggtgaggaaagactggttcaatacttcaggaaggctccacatgaaatttccacaggcactaaaaccacccagcagctgtccagagtcctggtgtccctgcttaccctagtgtctctgcccacaccttggagatgggaagtggaggccaactggggaataggaggaacccagaaaacctcagcagtcgccagagcaaaccaccttctgccctaagccgtggaaaggcttagaggccaggcctaccggccacagaaagtagaagagagttgaatggtggtggaatcaatgcagtaggcagcagctagctaagaaaggattttctccgagaagggctccaggtcccggcccaggccctggccctgcatgaaggttggggtgggcctcttcctccccgagtccagggccagggctccactcggggagggagctggcagccacctgggggctcctcgggcttgcatctatttgcagcctggactgcttgctttatttatttgtgcttttggctcccatgtgccacagaccccgtgtgctttgttctgccactacacggccacatggccttggacagtgctgcaaccttgcaaccccccaacctcctccgcatcgacaacagaaagccaccacacatgtgcacatacacacacacacacacaccagtgcatgcacatatgcacaccaatgtgcacatgcacctgcagacatgaacacacacacgtgcctgcaagcacacacacacacacacacaaacacaaagaggcgcccactctctagtcacaactctcctctctcctctctggagcctgtccctgctgtctggcccatcctctggcaccccactcacctctactgatccatgcatctctttcttcacacacacgaaagcttgtatctgaaatgttcacactcatgtctcagcttgaaaattaaatccctttaatgactgaaggtccaggtccttctgcaaaggaaaccctggagcgagtccttgggtaaagttaaacattctttttggaagcctgccggccaggcccaggccagatgctggagagggaagagccagggctaggtgggcagatttctcctttctccaggtgtgaagctcaagtgatctctttggggacaactagctgtagccagctgggcttaccagctcagcctccccgacagcgtcctaatggagagctatctagtgaatattccttcaggtctttttttcactatttttattaaaagacagtataggcctgggttcaaatcctgttctgccacttagtagctgtgtgactttggacaagtcacttaacctctctgtgccctgatatcttcagtctatagaatgacgataatgtcaataccacctcattgcattattgtgaagagtgaatgggaagacacatacagtcactagcaccgtgcccaagttgttaataatgaagatattgctgccattttatttacagtgtactaaatagtgaacaatatgattctatttacagcaaaccgtgacgaatggatggcatgggctcaatgccagcttccagccccagtcactaggctgcagttcagcccgccttgaggtaaggctaagggaactcgaggccctggctcaggcctggtctatgccttgtcttcttgctccacgtccttggatgccgttgcacaccccaccctgggctcactgggtttttcccttggcctccacctgcagttcccaggttcagatctcaggatatgtatcaaagctcaaggaacaagtttccttctggggctgcccatgtcccccaagaatgggctgtcccctggaagaaccaggggaacactcatcagtcctctagaccgtctgaatctggttgctggtgagcccagagaggggaagcaacctgccccgagacacacagcaaggcagcggcaggaggctcccaaggctctgagctccagcctctcactccaccaccagacaagtttacaatggaactagctcacgccccaatgacatggaagggagaatgagcccttggtaaatatgaaaagccacctcctccctcctgaagtctccaccaccaacagctgctcatacacttcctgctatcttcatgctgtggtcaaggctgacctctcttctccgcccttcaggaagagaagacattaaagcatgtgagagaggggagggccctggggacggggagccggcagagccgccagcctcgctgagtgcagtgacagaaagcagccactcccgccttcagtgtggagcccaggccgcacccagcctggagtccggggcctcgggcaagctgcctcccttccaggccggcgtgggccactccaggaccccgggactccctgccctcactttcacagaggcagctgggtgttctgggtgcacagctcctgtcagcagagcaggctcgggagcccactcggcttcaggcaaccgtcagcaaaaaacagtaacagcacgatccctcctgctcacaggcaccttccatgccaacaagtcctgcaggaaaagcccagatgactccaggatgggcccctgacttcgaggcaggccagccccctcgtttcttcacttttttgacccatgaggaaacagaagcattcattagccagaagcatgtggacgtccatgcagccggcagcaccatggcctgggccagcaggggccgagaacaggacatctgattctttcctcaccttccctcaaggacaaggtcagccaacagagcatgggggcgaggatgtgatggaagaatgcatttataaccaaggagagccagactgccctcaccggctaagattaggcaataaaggagtgctgaggtttgcatagaatcagggctgcctccctggaagaagaggactgtgaaccaggttgagaaggccccaggactgaagcatgtacctaacttctggtgttaaaatgtctgcacagttctacccgcctgcttgctgggcagggcagccacctgccagccgctcctgtgacctccgagaatggctgaaacctttgaggtgtctgtccaacaccagccgggaagtattacagctggggcgtgtgtttggggctatttctgagtgtcgcgggagagaagatgaaacggctggtatttcctgatcactctcactggctcattgtgaccttcgtgtagcttcaagcagttctgagactccaggagctggggttgtatcagacactgccagtgagtggggcagacacgttgaagcaagctgggcgtggcagaaaatcaggtgtgcccgaggcctgagcaccccctcccttttggtcctcacagcagtaggattcccccgtagacatctgggtcctgattgcgtggctctggagagggaggagaggttgtccacagcaccaccccctctgcagacacacacacacacacacacacacacgcacgcacacacccacgcacacgcgcgggcgcacacgcaaacacacacatgcacacacacacacacacatatctgaacaggccaggctgggtcaatgcagtgtctcgctgtgaaacgaggggagagcagacgccctgtctgagagccacatgagccagcagcctgcgtaggagcagcaaaccatgtccgagactctgggtgggcctcgtttatgtctggaaagaaaagggattctgaggagggctggggcaggcagccggctgcagggcagggagctcacccccattcaccgcagcccgcagcccaccatatgggccaggaggctcagcaggccagccctggctgccagggttccccggggacagctttggagcgcctggctcagcggcgcctttctcttggatgtttaacctcccaaagctgttggtggttgatcaggcaagcagagggtgcttcgactctggccgacttgaagagccctcttgcctctcctgcatgggattttcctgcccgtgggtctgttgatgaaggggggtatccctgggtcaccaccagctaaaaggcatttctttaaaataaaaaaaaaaaagccagatatagacagcactgcctgcaggagccaggtgaagagcaggatagaaacagttgcccagattctccaagcccagggatgactcccaccttcactgtctgacctcgggcctcagggcccggataattgtctcatcgggcctccaccctagactgtctgaatacttctgcagcccagccctcaccacagaggccattgtcattttttaaaaatagtaataatggataaacattacatttaaattgtgatacatctagacaatggaatattactcagagagaaagagaaatgggctatcaagctacataaagacatggaaggaaatgtaaacacatattgctaggtgaaagaagccagttccaaaggctgcagcctgtatgattctgactatgtgacattctggaaatggtaaaaccgtgggccgggcgcagcggctcacacctgtaatcccagcactttgggaggctgaggcaggcggattatttgaggtcaggagttcaagaccagcctgaccaacatgacgaaacgccatctctactgaaaaaatgtatatacaaaaattagctgggcgtagcaacatgggcctgtggtcccagctactcaggagactgaggcagaattgcttgaaccccggaggcagaggttgcagtgagctgagatcgtgccactgtacaccagcctgggcaacagagcgagactccctctcatgaagacagtaaacagatcagtggccaccggggtttggaggggaacggaggacgactgtgtggagcgcagggggttttggttagtgaaatgattctataacttactggaacggtggatacagggcattgtgcgtttgctgaaacccacagagtatacaacacaaagcgtgaactctaatgttgactgtggaccctagttaatgacaatgtatcggcattggttcaattggaacaaatgtgccacactaatgcaagacctcagcaacagggaaagtgtgtatgttggcagtggggagggtaatacaggaacactgtattttccactcaatttttctgtagacctaaaacttctctaaaaagtagtcaattaactctagtctgggcaacatagtgagatccccatctgttaaaaaatatttttagtagactctaaattaaataataataacaggccgggcgcagtggctcacgcctgtaatcccagcactttgggaggccgaggtgggcggatcacctgaggtctggagttggagaccagcctgaccaacatggagaaaccctgtctctactaaaaatacaaaattagccgggcgtggtgacgcatgcctgtaatcccagctactcgggaggctgaggcaggagaattacttgaaccctggaggcgaaggttgtggtgagccaggatcacgccattgcactccagcctgggcaacaagagcaaaactccatctcaaaaaatagtaacagtaaattacacacagtgcacatttcattgtgtgtctattaaccatgccttttattttctgcattctgatgctttgacatcttggggccttccggaccctggtgggactgccccctcccagggttaggtaatttctaaatgtagcaaacagctcaccttctaaagggcctttcatatgcaaaccaaccagtccagagccgacaccccagccacctcctttatcaggctctgtcactctgggccactatgcacctgccctgatcaccccagggccaagtgccagacatcttgggacaacccctatccccagagccctctgaaactattcaaactagcaatcctaaacctggttaccccacccagtccttcccatggaaaccacaggaaaggctcctgccgggctctacttccctctgcctctggccagccctggtgcttccccgtgtggcctgcatggtgtggtctgggcctttctcgaggctgtgagtaataaactgtcttgtccattgcctggtccattagccatatcagacctaaataacaacagcacctacattttaaacagcactgacctaggaccgacacagggtgaggcgctggacaagttatccacccgggactctcgttttgaaggtgagcttagcttggttttcagggcagcagcagcagctcctaaattgaaggattttcagcctgtggagtagccatgagacccatgctctctgggagtcctggactgtgggagtagggatggagcccaccccgtttactccccaggtgaatgaactgaggtccagagaggggaggatttgcccgaagtagccaagctcactagcagcccatcttgcacttggcacgtgtgggaagccagagaagctgggcacagctcagtgtctcataccctctgccatccctggaggggtgaggctcagacacccactgccgacacagacacccaatttcagtcaagcccccagacccccagcctacccatggcaaggacgttccagccaagttgcctttcttcctgttcctcggtatcctgtcctcctatccgggcctcacctgacctcagtgccacccagggccccagccctccagttcaggagggctcgagacctgcagataggatcttagcactgacacgtcagagggtcccccgatgcacacgagccacctcccctccctcaccgctgctgcggggcaaagccaagcagatgctcttagcagagtggccctgggatgccttgggaggcacaactggtagctgcgtgcagctcaaagctggagccacctccaatgcccagaggaggctggccagaggggcgaagaggaaaccaggctgtcacgtcaggtcaagtgatacattcggtggtggcctgaccccagccggcttggggaggaagctttgggacccggactctcatgcccagactctgtgtgtgtgtgtgtgtgtgtgtgtgtgtgtacacgcgcatgtgcgtctgtatgcacatacgtgtgtgtgcatacacgtgtgtgtgtgtgtgtgtgtgtgtgtgtgtgtgtgtgtgtgtgtgtaggggcagagtggagctctccctaaaagttcttcttaaatagataatgtttatcaagaagtacccagaccagcagcgggaaaaatacttaataaccacttaagtaaacagcaagattggcaggaaccatttttcaagagaaaagagctgggagaaggctgccaagcgatggatggaaagtataataaattccacgtcactgcagaggctctggctctccaaggcactctgggcccatatctgtcgctaaggctctgatgggccggcacaggacacttcatcatcttactactttgacatatcacatcccaaaaggtggtgctgggcttgggatgtggtggctgttcttcccaaaccactgggagtttggagagttctgtgtctgtggaaggggagctgcgtcgagctcgctggggctgtggcaccaggaggaaagagcattttccaggagccagtgtcccaggcagaggatgggaggtggccttaggtgatggcatatgaagagggccgttcctcctccttcatgcaaggatcatgcagctggccctaagccagcctccaggcactctggccaagcctcatgtgcccttccccttccccagtagttcccagcgtggggcaaacagttctgtcttctcaagacccaggcgacgtgtctcctttgcagatgcttcagaatccggagcaagaactctgcagaatgaggcagctgaagtgccccagtggaacctcattctgcagacctagcccaggggaggttaccgggcaggcagcttcacaaacccacacacaagcaaagggatgttttatttgagaccacgaggccatggtgattcccaactcaccaatccatgctccggcactgacctgctgtgtgaactcagacgagccccttaacctctcctccacctcaggtgttctcccccgtcaaatgcaattcacagttttagctctgccggccccgccaggctgtgggcagatcaggtgagaaaaagggatgtgaaagcaagtttgtgaacggcacagcacggagcaaaggcaggacactgtcacttcccatcatgggtgctgaacacagagccacacccctgccagcctcaggccggggtgcccagcctcccccaaaaagctgcatcacagggctctcccaagcccttatttgcatttagctcccctctgtggtcctccctgcagtggctgaggatggtaataatgacagtagctgagcttcgttgagtgtgttgcacaacagcgcattgcactctcccagcaaccccgtttttcagatgaggaagctgaggtgtagagaaggtaagaaattggccaaagtcagagtgaacgagcagtgaggctgggtgtccgcctcggatctgtccggcagcccctgggctgggtttctcaggcattggccctccagcttggtgatttttgccagcgttgtgcccaccctggactatgatgtataatattgtgtgtgtatgtattaggtatagtcatttattcaacacatttttattgaggacctaatatatgtgccaggcatcactctggcgttagacataggtagtaaaccaaatggacaaaaatacctacccatgtagggctttttattttttgagacagggtcttgctgtgtcacccaggctggagtgcagtggtgcaatcacggctcactgcagcctctgcctctgagctcaagtgatcctcccacctcagcctccaaagtacctgggactacaggtgcataccgccatgcccacctagtttttgttttgttttgttttgttttttttgtagagacaagtttcaccatgttccccaggctggtctcaaactcctgggctcaaaagcaatccgcctacctcagtctcccaaagtgctgggattacaggtatgagccacccctcctgaccatgaacctactcacttttgaagtaacgtttattttcagtctgggtatggtggcctataatcccagcactttgggaggccaaggcaggtggatcacttgaggtcaggggttcaagaccagcctggttaatacggccaaaccccgtctctaccaaaaatacaaaaattagccaggtgtggtggtgctcgcctgtagtcccagctacttgggaggctgagccacaagaatcacttgaacctgggaggtggaggttgaagtgagctgagatcctgccactgccctccagcctaggtgacaaagggagactctgtctcaaaagaaaaaaataataataataacattgatttttaaaagacaagttcatgtcgctactacaaatgaaaatccagcattggattttctgatcctgtaaacataaataacattagaaatcaaggtcagcaaagtctagctgagtgttcttgtctgctgaaggcttgaatcctgaagaacgctcttatttgcttaaaaaggagatttccaatcttcaaaaatgtttaaacatggaattatcctatgacccaggaattccactcttagtatacacccaaaagaattgaaaacagatatccaaatacttgcacatgaacgttcacagaagcacagttcatctcacagaagcagaaaggtagaaacaacccaaatgtccacccagggctgaatgaatacacaaagtgtggttgacccacgcagtggagtgtcacaaaaggagggcccatggctgggcgcggtgactcattcctctaatcccagcactttgggagcccgaggtgagcagatcacctgaggtcaggagttcgagaccagcctaggcgacatggtgaaaccccatctttactaaaaatacaaaaattagccaggtggggtggtgggcacctgtaatcccagctactcgggaggctgaggcaggagaattgcttgaaccccaggaggaggaggtggcggtgagccgagattgcaccactcactgtattccagcagtttgagtgacagtgagacttcgtctcaaaaaaaaaaaaaaaaaaaaaaaagaaggcccacaaaaagagggaagcaccaattcaggctgcagcacgaaggaacctccgaaacatcacgctcagtgaaagatgccacacacaaaaggtcacatgtaaaataattacattgctatgaaatatccagaataggtaactccacagagacaaaaagcaaggtgctgaatgccagggggtggggggcgggtgtggagatggggtgggggaaggaggaaggagtggttgcttaatgagtatggggtttccttttggggtgatgaaaagtgtcctagaactagatagaagcgacagttccacaacattgtgaacacaataaatgtcacagaagtgcgcactttaaagtggctagtggtgaattttatgttcagtgaattttatctaaattttttttcaaatgggagatttccaagtgttagcaaggtgttagagacataccttcaccaaatgagattttctccttaatgctgtaagagaagaatgaacgagaatggcatattgcctgctaatctccacggtactttcgcctgcagtgtctccttgggtctgctcggtgaccttggactgccgacgggaaggtgatggtatctgcattcgtttcctggggctgccatcacgaagaaccacagactgggggtggcctcaacatcagaaatgtatcgtctcacagtgctggaggttagaagctcaagatcaaggtgtcagcaggtttggcttctcctcgggcctctctccttggcttgcaggtgtctgtcttcccactgtgtcctcacatggtctctgggcgctcacacatccctggtgtctctgtgtccaaattcttgtgaggacaccagttgggttggatgaggagccaccctaacggcctcatttcaacttaatcacctttgaaaggcctcatctccaaatactgtacagtcacattctggggcactgggggcttgggctttagcacataaatttcgtcgagagaggacacgatctggcccccaacgatgtcccagctgacttgatgagggacatgcagaaggcagctcaagccacagagttggtgggagcagcaccggccaagagcccgtgtgctcagagctccccccatatatgctcctccacacctgctgctgcacccaggggtgtgaatgaccatacacacacacacacgcgtgcacacacacacagacccacacacgcccacaaacacacacgcacacacaaacacacgcacacacaaacacacacacgcacacacatgcacacacacaaacacatgcacacacaaacacatgcacgcacacgcacacaagcacacacacgcacacacgcacacacaaacacacatgcagacacaaacacatgcacacacatgcgcacacaaacacgcacacgcacatatgcacacacttacacaaacatgcacacacttacacaaacatgcacacacacacgtgcacaccatctgtttcagagatcaagactgttcagcctcagctcccttgcccttgccatctccactgtgtctccctctcaatccaacagctgcacaggcccccacgaaggctctgatccagcatctgggggatgcatgtgactaactaattaactctaatgaattacgtgtccacacgcctggtgaaaaggacgcacacggaggatgcatgctttcccgagtttggacctggagagattgataacgacgaccatgcatttggaattcagagttgggtctttgtttaatatgcatctttcttctccaggcatcaaagagattattttttttttttagagtaaacagacttcaaaacaggatttagtctctgaaagcctgcacctgatttgtcagtcctggctcaggctgccccaagccttaatcattttgcaggtggatgaaagagatctgagatagtgacgggggggagaggaggggagaggatgcgtgcggaggtgccaagcatactggctctgctcctgcaactgaagcagacatcaggacccggtctgtttgagccagaaacaaagggcaccaagcaataaaaatgagcccatcttctcgtcccacacctcccacggccatggcctcacaggagccccgtctcctcgctgaatacgtccaaggatgtgtccatttcatcctggctgttttaaaaagccatcctggaaaagatgctcacgtgggtagccctttgcctcagcgtcagctggttgactccactcgaagcagccccttcctgcaccagtagcccctccaccctgctcaaacccgaaactggggtccccttcaaggtctctgtgccccttgccccaggccaagcctgcagagtccagccttgcagaccaagcctgcaaagcccattttcaaataatatgttctcattctcgaggggcccctgctccccccatccctccccagccacatggctggactgaagcttgcacctgttttgatatccagggaagggtctagcccagtaggtcacctgtctgatggctgccccttaaatgcaggtggcatgcccagaaagactcaacctgcctctgaaaccctccctggtccccacagagggacagccacccccctccctccctgcaccatcaccaaacacagatcagagcctgtatcttctttcttgtcccactgtggtctcaacagcaaagcagtgtcctgttacatgattggggggtggggcgagatgttcggggaggcccggttcagtcacactggtggtgcctatagtatccagcagctgcctgcacccagtatgtctacaccccctcagaagccgggtttctgcactgccccgcctccccgcagcagagtgtggaccctcagtgcaagacaagcagtgcccagaagctgggtgtggagtcagacagagctggactaaaccccagcgtctcctctttgcaactttgggcaacttctgaaccatcctgagcctgtttcctcttaggaagaatggaggtgatcatggaacctgccctcggagtgagtgtgatgtgatagatggtgtgaaaatgcctggcacagagcgggcactcggcacacactagctcctctgcttactcctgtgcccctcggctccttagaaagagaaggctgctcagcggagagaggaagggtgcagggagaggggagggcgccaggagaagggagggtgcagggagaggggatggagggccctactccccattcaggccaaactgcatttcaccaatctccaggttcccatgtgacccccagctccttggggcacctacgtgctcccctgaatctcagcccccacttgtgggcactgagggagctcagactgcagaaacatccaggctggctccagcccggccattctgaccacatactcgtgctaattccgccagaaagaccagcctgtggttagcaagggcagctattatggtttccagaaaattcctttgagcaaagagaagctgtttgccattcctgaggcccctccagcctgtacaaatgtggctttccaattaagctggggctgctcccagatctctatctgctttccttctaaagtaagaaaaatcctagagcagtaggcactcctttttatttttctaaatcacttccagttattttttctgatgacccaagtagtgccttttctgttacccaggaacatggtagaggggctgattggggtcagaagtccgggggaccaagttggggacctcataaggagagacaagtttgggagaaggatggcaagctcctctctggatgggttgagcaagaggcactttagaattcttgaatctgcctctgggcaggaatgtctgggagagttggatgcccaaggctggctctcaggtgtgggctggagtggcagacttggagttccttggcacagatacgacatcacatcatgggcttggatggggtctctgggacagtgtgtggagttgagagaggaaaaggccaagaatgaaacaaggaagagaaaacctggagaacagaaatcatcaaagtgtggcaggaacacagagggggacgagaccaagacagagggatgcagtgaagccggggaggagggggcttcaagaaggggcaggtcagctacatcatgtggccagagagctcagttcagatgaggccccaaatggcccacttgatgtggtacttgacatgtcagcaggcaaccaggagaacacagcaaaagtgacattatgccagttctgggtccagtcttgaagactggcacatttcacttcctctttcttaaaatgtgctctcttggggccctccctctcagacccaggcacccatgctgtgagaatcccagcctaggatacgtgtagcctctccagtcaacagccctggtggagtggccagcccagagtgagtcagcatcaaatgccagatgtgagtgatacatcttggggactctgacttagtcatgtttgtttatgactgaagccccatccagaagaacctcccagctgagcccagtcaactcataaactcatgaaataacaaaatggttggttttcacaagccaaaaaaaaaatgtgtcatcagagattccaccagaacaactttaatggcttgatggggatagacccctaaccaagagggataaagcatgaacaagcatgtgtattgtgtgcacataggcatgtgtgcagggaggagagacagtgtttagaagggcttcgttgaggaacttgactttggaaggattgctcatttcccttcactatttaaaaggtcccatctttgccaggtctcaggcaaatttcctaccaggaaaagcccacccacagcttgagaaagcggcttcatcaaagatcttgaccctgtgatcaagcagtctcagagccttaggcagggagcagcagcctcaggccccagtcccagcccttctacttaaattattgggtctcagttggaaacagtggctcacgactataatcccagcactttgggaggctaaggcaggtggatcgcttgaggtcaggagttcaagtccagcctggtcaacatggtgaaaccctgtctctactaaaaatacaaaaattagccaggcatggtggcacacgcctgtaatcccagctactcggaaggttgaggcatgagaatcacttgaaccagaaaggtggagatttcagcgagctgagatcgcaccactgcactccagcctgggtgacaaagcgagactctgtctcaaaaaaaaaaaaaaaaaattgggtctcaatttcctcctctccaatgcagggttaatggcacttcgcctgccaatttctcagggccattgctggaaagaaataaaatgaaggatataaaaactatcaaggcaaaggctaatgtaaaagattcttctgattcctactcaaagggaggaggaggttgagggaggaggaggttgaggtccaaccagaagctggcggcctcctgaagtttcgacagcacacttctctaaaagcaagcttaggaagatcaaggcacccacagggctttgaatctcactagcaacctctggcaacccttccattctgctcagattgacattgtgctaaagagcctgcctttggcccctttgagggcttcttggatttgcagggaaagttagggactgcttctgtgaccaaaatcagaagccatttctacagcacctgctagaagagctggcttccctctctgtctaacataatcccattttctgcctccaacatctatggcttgaaatctgtgctgccttatggcatggaggagagagcaccagaaaatgagcctaaaaagtcagaagttcaaaaaagagaaacagaaaacattagcacctttatcctactgacctgcaggcagcatcctgcaccaggactgtgaggaagccaagagaagccgagagcaggcataagatgcaaaacagagtaaaataaataaaagtcacgcatcgtgttagggagagggtccacgtggccgaccaatggcagcagacagcccctcctgacagctgcagctttagggggccttcagagtggtttccatggcacccgtgccttcataatcctcacccaagcggctctccttcagctcaccttgcgtcaccaagctggaggagaaatgaagtaagtgtgacaaatatgctgatatccagagagaaagagaaggtgggggaaggagggaggcaagcccaggggcttcctccagggcaagtggctggggtccctgcctggggctctgagggcatttctgggggaccaggcctaaccaaactctgatttagaaaaatccagggactcaaatacccaaacagtttggagagaaaggtgatctgagctcctgtgggcagatggtcgggccttacacagcaggtccctgggaacacagaaccctggggcaccaggctccatggccaccacggtcaggtcttattgtgctcactcccctccaggcccctggcagaaagttcagcctttatctccacgctggcatataagctgtgtggcctgcattcaccgtgtgacctcgcaaagcctgtgctcatctctctgaaaaaatactgggttgtcctgaatattgaaaatcctatatttagatgttcccagctcatgcctaggacatagaaggattgcagacagctgcagatttttaatatacccatttcgttgaagtacaattcacatgcaataaaactcactaattttaagtataccatttgatggatttcaacatgtatatgtagtcatggagccaccacccaatcgagatagagaatgtctctatgatgcagaaaagtccctcctggccctctgcagtcaatcttctccccccatcttggccccaagcaaccactgatggattttctgtccctaaagctctgccttttccagaatgtcatatatacagaggcctctgtgtctggcttccttcacttcgcacaatgctttcaaggctcacccacattgctgcatgtaccagtagctccttccttttccctgctggatagcattccatcctttggattaaacagaaactttcttgcgtgtgtgtgtgtgtatgtgtatgagactgggtcttgctctgttgcccagactggagtgtagtggcctgatcatagctcactgcagcctcggcctcctagactcaagcaatcctgttgcatcagcctcccgagtagctgggactgcaggtgtgcaccaccatgcccagctaaatttttttatttattgtattttatttcctgtttttttcttgttttttttttttttttttttttagagatggggtctcactatgttgcccatgctggtctcaaactcctaggctaaagcaatcttcctaccttggcctctctaagtgctgggattaaagccgtgagccactgcacccagtcaataataactttttaaatatttgattatgtttaatgatacttgaagtccaccctgagtcctgttcccctttgtaatactctgctgtttcttcttgggttcatctcagaggtatcatcatggtcacaccttcctggcatgttcctgagcttttatcttcacgcagacccagtagtacctgctggtggggagaggggtagggaaggggtgggggtcgcccacccaacccaggctcacccccaatcccatgtgaaactgcgcccacccgccatggctgcacccatgggtgtcaccagtgggacaacagtgcaggcgtggccttgctgtagcatgcctggtccacctaatgctttcccagcccctgcctgacctttgccaaatctgtcctttctttctcagccctagagccccacagagaaggtggcgtggaaggtccccacaaaagaatccagcccttctccatccactgatttcttttctttcattcattcaacaagaaattattgacgggcttcctgtgccaggcacaggccaggggctgggtggcaggcagaggggcagcctccagggccgcagggcccagccaggcccacctccatcacctctccttccccgccccagacttggcccaataggcaggactgaaacgaaacctcgcccctccagcatcctccaatttcttgctcttagttcagaccctgcacagcagcaggcaattgaaaaggacttccggatacccgctcacactttcatccttcttttctctctgccttttttcatcttctttttaaaaatgctctttaatagtgggaaagttagcatgaaaaggagagaaaatgaggcttgaaaagaatgtgtctgatgtgcagcaatttgttcacctgcgagaggttcttcccctcctgaacctcgctgctggggggcccagcgctgccgggcggcaggaggcgggaggcggctgggaagctagaggaggcccgctcttctgcccttctgaaagcagaggcaggaggtgggtcaaggtaagagattggcctcatgacagcaagtaaagtcagggtcgtaggagaccagggtcacctgccatgtccctctggcatctgttggagccacaatagggacctggagaattgttcaccataaggcatttcctttcctgtcttaaggcaagagcctggtgtcctgtgtggtggggaaagggggcctagagtcagggaatggggtcccagcagggcaggttcagggcctggtcaccccaggactcagaccaccatttcttcctccctcctacttgggctccagccacatgccccactgacctctggaagagccagtcagatcccagcgaaggatccttccccgaggatcccagctgggcttagggtttcaagaaagcctcaactggcctccatccactctgcgctggactgaaccagctgccccctccccttactcaatgagaaagctcaggacccacatgcaagacagagcctgcaagagaagacccccgtcgagctcctttcctgcaaaggagaccattctttggctcctatcatgagaggcagggaggcagggaggcagggaggcagggaggcagggccaaagtacccacagggcaggtgctgctagagcttgtttccctgggaaatgacagaggggtacgacgccagcgagcctggagtcttgacaggctggacggcccaatgattagacagtgggctctgggccagcctgcctgggttcagataaaatcagatcaaatccatttgctgcttattagctgtgtggccaggactggaaccagacagaaactgggggtgattatagcggtgcctctctgagtcattgtataagttaccacccataatgctcttgggatggtacttggcacacagtaggtgcacggagaaggctggtgtcccgagctcagcatcattattcagccagaccctccccagcatagtagcgcccaccccgctggcaggataggaggatggaggatgggtacttcccccctccccttccacctggggcagggagaatctgccaggagtgccccgtccctgagctccagcctcccccaccacccccagtgacaaagacagagctggagctgggctgggtagcaaaagctgcagacagggggctgggctgatacctcagggttgcccccacactgcacaactctggggatgccatttacatcaacagcccatggtggcccctgcccagggccaaggcacaagctctggaggagacaggccagggttccctgagatgccgtttgcccaccaaaggctgcttcaaagccccaaagaataagcctgacaaggcagagacagaagcatgggctgagaagggcctgggagcccgatttgccggtgggcccagcctggggggacgtgggttttcccttctcctggagcacagtggcctagttttgtcctggagactgaaaagacagacccagcgaaaagcttcatgctgtccctccctcaaagccatctcacgcccacacatctccacacccctccccagaggccagagctgcgggaaccccagtgagagtgtggtttcctctcagcctcgcccctcagagacttccgctcagcagcagctgcggccaggccagctcgaggcgagacatcagccagtccttgtgaaacctccctgcacggtggagacagacagagacagggcaccaggccaggccccttccagtggagggggcagcaagtgagcaggggcggtcagaggggtgggaatcacaggggagaacagtgactagggagagtgatagagaagtgtgtgccactgctgtgtgcatgtgcaaatgtgcatgtatgcacataggtatgtgtgctgcacgctcaagtgtgtagtatgtgtgcaagtgtgtaggtgggtgtgtgcaaatgtgtgagcaagcacagctgtgtgcaaatgtgtaagtgtgcactgtataggcacaaacggatatgtgtcagtgtacaagtgctgcttgtgcaagtttgtggctgtgtgtgcaaatgtatgcgagtgtgtctgtgcctgtatgcaaatgggtgtatgcaagtgtgcaggtgtgtcacacaagtgcaagggtgcatttctgcaaatgcacatgtgtgcaagtgtgtggacatgcgtgcaaatgggtgctagtgcacaggtgtgtgggtgtgcaagtggatgcaaacgcatatatgtgcacatgtgttcaatgcatgtgtgtgcaactgtgcacatgtgtgcaagtgtgtgtgtgtgagtgccctggaaaagagagagggagaggaggagggaaggaagagcagaaaaatacctatggtaaaagccagcactgcccagcagacatgtccaatggagagcaccaagaggcagaaacagcctctctttgttcctgtctcagtagcgggcatagtagcagtacaatgacttgtgctgcctgcctggcagatcacacaggtcacagatgcctcctcgtcacaggatgtggtcgctgcaccctgtcctaactccagtcctttccctcaccttcaccagctaaccccttccctccaaaccccctcccctgattgctgtcaaggtcagcaggccccgccccatccatgagcgagccaagggtagtatctgctcaatgccgtcactccgtgtgggccagcttctcctcgcccaggaacaaggggatttcctgactgtctctttaggcagggtgacgtaagctgttttgctagtgtagagccaaagagccttccaggccttcatttatctagatgtggagtcctttgggaatgagcatagcaggcttgttcctgcccagcatcttggaagatctcggactagtgctccctgcagatgattgggacctaagaaacagagccctgcagaaggactggcaagaccacatgtcccggggtggccagtgtttccagcagtgacacttgggattgaaaccaacctttgcagagcgagagaccccacagtaccagctgtgccactgactgggaagtgcccagccttggccctagagtgggaaaatggcctggacatgaaatgtgtggggacctgacacctgtgctggcccctgcagcagaggcagaggcccaggcaggcggggacctgcttttcccagggctctccagggagtccctgcacagccctcaagagcctgccctgcgttatcatcctcaaggtcaagaaacttccttgggggagtctccagagacaggcagcctggccatgccctggcggacccacccactctactccaggacctccggatttggtctgggagtctcggcacaggggagtctgccatcgaaccagccacctgcatcagagccgggtccacctcctccgtcccgctgtggctctttgagcctcagtttcttcatctgtaaggtgggaggtgaggatgaccaattcagtgtctggtgaagacaaaatttatccccttgtccagggctggcctggagcagaccctccccttcctcctcatctcggccccaggacaagcatggcttccctccctagccttcctcccttggagctccaggcactgaggactcctggcagatctcattcatctctctctctctccctctctccctctctctctctccccgacccccccccccccgccagaaagccacgtagatatccctctctcctggaaaactttcctgcccccaagccccggtggggtgcctctcctacggccttgcatgtatcccaaactttccctaccttcccatcaatcgtggtgagctggaattacctgataatctacctgcctctctcttggactacagtccccttgagagtgagactgggtccagtagactgttgtctgcccagtgcccagcacagggtagatgtccatgaaatatacatggaccagtgaccgactgagattgagacttgactggaagcatcttccaaatggctgctgggagagcagcccatccggcaccccagctcatgccccatcccccactcctccagctcctctcctcccaagtccctgccgtcacagccaagctcgcgctccaaggcagctctgccatcatctgatgcagactcgtcagctgttgccatggagaccagccagcagtgagctctgtgccctcctgctgcaggggccgagcagagcatgggggcaccctgaagcgtgcagagagaacccatcaaggaggaggcggggggaacgcgtggctctgcatccaggcaaacctggagttgggccccatctgcccctactctccttcctacacctgtgacacctcaggcaagttgcttcatctccctgagcctcccgtgaaatgcagaagatcccagccacccactgttattgaaggatgggatcgacccattagggcatggagctgtctctgtgtcattttggtgtgccaacccctgccttggctttctgggggctgttttgagtgttctctccccttgaactttgtgtccaactctccccacctcaactcagatgaggctgaaggaaggagagattccattcctacaatagcacaaaaagattttctgtgacatttgaaaacaagaagaagcctacaggtttgttaaccaaattttgaacttggtctggctctgagggctactaatgtgggggccacattggttgcttcctgcagtgagctaagggctatgggcaactctgctcatgaagagcttaaggtggcatctcacttgcaggacagcctccaggtctcactggagtcagggaaagtgatggttgtcctatctccttgttgctttaaatggtagctatctctgaagatggctgaatgtccctgtgcccactggggactttgggaacagaaacatgccaagatgctacaaccggccctgggcacaaagccacctctccagctttccatgcccagcattagtcctggcatggagctgaacacctgtgtctgaggcaggcctaggccctgatgcaaaatgtaccacccacctccttctgccaaatgtcaactcgacccagctgcaaggcagagaaaacttggcagtgttcccaaaggggacaggagattgtctcttttgttaaatgaatggatggatggatggaggatggatggatagatagatagatgggtggatgggtgaaagggtgggtggataggtggttggatggatgggtggatgattggatggatgggtggatggatgggtgggtgggtgggtggtgaatgggtgggtgggtagataactggatgggtggatgggtggttgaatcggtggatgactaggtgaaagaatggatgaatggatgggtgggtggatgaatggatgggtgggtgggtaggtggatggatggatgggtgagtgggtggatggatggatgggcgggtgggtggatggataggtgggtgggtggatgattggagacaggaaagaaagagagagagagagagagaaagggagggagggagggaaggagggagggagggaggaaagaaagaagggaaggaaggaaggaaggaaggaaggaaggaaggaaggaaggaaggaaggagagagacagaaagagagagagaaagaaaagaaagagagagagaaggaagggaggaaggaaggaagggagggagggagggagagaggaaggaaggaaagaaggaaggaaggagagagaaagagagagagagaaagaaaaagaaagaaagaaagacacaaagagagagagaaggaagggagaaaggaaagaaggaaggaaggaagacagacaaagtgaggaagattgcaccaggattgcctcagatgggtcttgctatgaataaaattcaataataccaagaagagctttacaaaaagagagagagagataaggtcaaagagacttttatgtgcttcatgaatgaagaacactaaggagaaacgttccagaaaatttagaggaaaaaaaaagtggctgaacataaatttttggtgaggataataaaaataaataatgccataaactcttagaaaacctggtggttttccttcaagggcttcagttaactccagagtgagctgtgagctgtgtccaattccgtcatttcacggagcaggacactgagccacgggccattgagacttgcgtgtaatgcggagctggcgaaacacaacagtgaggtgtttattggagaattttgaatatgactaagtccttctttacagagcttagcattttcatcgtctgttttaggatgagagaacagcatcagcagcattcggcacgattgacaggttgtgtttgctctttgcttatacctcctaaaaagtggactgtcttggaagttttattgtagttcccctcgaagcagccgcaggtgctcactggctcactgacagcgaggaggtgatgcaatgggcgcagtcattcctcactgccatcggcgtgtgcagcttggggaagcaccacagcaccgggcgtggctcagttgaccagctgaaggttccagatcatggaggcagagaggagaagctggcgacagagggcaaggcgggatctgtggaggctcttcctctgccactgtggaaccctgagccagccccctgcctcgggcctgtctatattcccacagagatgtggagagctgttatgtgtagctagatgggttctaacgtgtctcccagggctggtatttggaagaaataataaagaggaaaaagacattgctgatggatcccagtggatcatgcctgaggtttgggagcagccccggtcttccttattgagtctgtgtgatctaagtttcccctcctgtgacctgcagcttcctcccacagagctttgcaaactgttttggcattaggatccttctgggaaatagcaccttactcaagaccccaaaatatgacacagattaaaaaggaggcatgtcgttctgggtgggacgtgggctgccctacctgacaccctgcctgttggggctcccatttccaccctctccaccccgaactctgaaaacccctgtgcgacagggaactggctttgtcttgtctcctcacagcctgacagccacaactctattatacagtaagacccccgaggctagggactaagtcctgtctttttatctccagctcctagcagcattcctaacccaaggcagccacacagtgtttgttgagtgaatgaatgacctgggaactagtcgctagaataatgctacataacagacaaccccagaaatctcaatgacctacagcaacaaagatcaacattttttcttcttaatgggtacagatcagcagaggctgggctccatgtgtaatttcagggctcatggccacacccagcattgacgcggagcagggaaaaattctgcacccactcttggcgggggagggcgggaacgcactgcaaagccacctggcgaaagaggcaaatgtgaaattctacaccagggagggagggaagaattagaaacaggaatccaatctgccacaaactagaaaatggaaacaataaaaaagaatgcctccgtggcgtggtagaggttgttacagcgtcatgtgtttcaagctgctgtaggctacaaagccaggggtgagtggagcaaccgcgtgctgttaatgccacgtcccctctgctgcgatcaccgcgcagtgaccggaaggagagctcattctcacagagggcgatgacgtgccggacacagggacccttgcgcaacaaggtccaccacacagagggattgaagccgtgcgttctgctctaacaaccgcccgagctgcccctcctcagaaaatgaccgattaggaagggaggctggcctggcatctcaaaagctgtcaggacagagaaaaatggggatattgtcagcacttcaggctcggtggcggtatatccgaggatgtgagggtgtctgcgtaactggcatcggaatcgaaaggccccgcctcccccatgcacgggtgcgcgcacacactcacaccctccctccctcctgctcccccaaagggactcgaatgaaaggcgtaaatacaccgtgtctgcctacccgagggctgctgtgagtgtcagatgagaaaacgcctggggtagtggcccgagactgaagcgcgctccacgcctaccaagtgccgctcaaccccaattctgctctcggggagagaagagaactcctgccagacccgagtgttttcagaagtttgtcagtttagactttcctttttttcctttccaaagctccgctcacccaagagaataatgtaaacattcatgatggcgttttcatagtcccggaggcattgatcatgattgtgaatctgaaaagagctgagttattcatgtttgacaattcagtcatgcagcactccacatgttacaatctttaatggtgaacattgcttttactttccaagcactttctcatctgttgtctcataggggaggagttattctcccaattagggcaatcagaaaacagggatcaaggccaggcacgacggctcatgcctgtaatcccaacactttggggggccggggcaggaggatcacctgaaatcaggaatttgagaccagcctggtcaacatgatgaaaccccatatctactaaaaaaaaaaaaaaaaaaaaaaaaaaaaaaaaggttgggtatggtggcatgcacctgtaatcccagctactcaggaggctgaggcaggagaattgcttgaacccgagagggggaggttgcagtgagccgagatggcaccactgcactccagcctgggtgacagagcaagactctgagagaaagaaagaagcaagaaagagagagagagagaagaaagagagagagagagaaagaaagaaaaaaaaagaaaaagaagaaagaaagaaagaaagggaagaggaaggggaaagtgaagaggaagggaagaaaggggaagggaagggaaagcagaggtcaaaaaggatcaggccactcgcctactgggggatagcgcatggaggaatcagaccccacagcctgctcttcttccccctagaaccctcaccactgccagatcactgggctatgcactgcttccctcaaaatgccttcagctttctttccccaacccctgagacttaaggatcccacctccctccagaggcctgtgtcccgtccccatttgttcctcatttccctggggtctttttgcatctcccttctctccctctgcacagccaccgtcctgcctccctatacaaaccccaaagtaacctactctccccacagatcctccagacagacagacacccacctgctgccttggcatgggctcccctgaaagcagtgtctggggctcgagctggtgggcaggcatgaatttgtgtctgcaggggtttgaactgtgttctccaagcgatcatacccccagcaactgtaaatgtgaccttattctggaatagcatctttgcagacgtaatcaaattaaggcgaggtcatagggtgggacttcagtccaaaggctggcatccttaaaataaagagaatttttttttattttttatttttgagacagtgtctcgctctgttgcccaggctggagtgcagtgactcaatctcagctcactgaaatctccatctttccggttcaagtgattctcatgcctcagcctcccgagtagctgggattacaggcacctgccaccacgcccagctaatttttgtatttttagtagagatggggtttcaccatgttggccaggctggtctccaactcctgacctcaggtgatccgccctcctcagcctcccaaagtgctgggattacaggagtgagtcgccacgtctggccagaaagggaaatttggacacagagacacacgcatgagaccaccaaggcagagactggagtctacaagccaaggaacgctgaggcctgcaggcaagcgccggaagcaagaagagaggcacagggtggcttcttccctggagccgtcagaaggaacccacctcgctgacaccttgatcctgggcttctggcctccagagccgtgagaggatccatgcctgctgttcgaaggctctcagtctgtgcgaatttgttacagcagccacaggaaaccgacacagtgtccctctccctgaggtgtctacagtcctcagaaagagatgaggccagggtcacttgcagaaagtcctttgggaagcatcgtgattggagcagctgtggcccggcggggaaggcaggacttggagcgggagagagctctgtgccaaccccagcttgtcccctcggtgggggcaggtgcttagtgtcccccaccaggggctcctcaactctcaagaggtgagttcaatgccgatctcccaacgttaatgataataataagagagcagcagcccttgccaggcaccctgctgggcattcggagatatgacttctcacccttcaagacgagtctggccattccaggtcagaggaactggccgtgaagaagcacccacaacagctgggacacggcaggcaaccaccatgcttccagcctctcccgatgggaaggtgtcggcgtgcaaggagctcttgcaggaatgcttgtatcaaagaccccaaacagggcagcagaggcccaaggctggctggagtgccaggtgtcagggctgcgtgccccccaccctcccatccactctcccccacccaccccccacagttgagactcctccctcctgggcaagggtctggtcatccccctgacacctggcttcctctgaactctgctctgagagtcacctttcatgcattcgtcattcactcaaaaagcccactctgagcacccaggctgtgcccgatgccatgctgcaaaacggagcccttacttgaagatgcaagcccagcacacctccaacagaggtccaggccttggggcagtggcagaaacctgaggccatgctggcttccccccagctccccatccccacctcctcccctgccacctcccagggatgcctgtaagcccaggtttctccaactggggtcctcaggagctctgggtgaggggctcaggacacactcatcagcacagcttgctggagtaatcattttacttaagtagattgggatgggaggagtaaatgttgttgttgtcattgttgttttgagacagggtcttgctctgtctcccggggctgcagtgcaatgatgcactatagcctctaaaccctgggctcaagcgatcctcccacctcagcctcccaagtcttgggtgccaccacactcagataactttaaaatattttgtagagatggagtctccttatgttgctcaggctggtctccaactcctgggctcaagtgttcctcctggcctggcctcccaaaatgctgggattttagagatgagccactgcgcctggccggtgttaacttaagtaatttgattgttgcacaacctaaagcataattgttctactaagacacataggaccatattacagggcacaatgtaaaagtcatgaatttctacaacaagcctcagtggttcagaaacttctgttcccttctgcctgcaatcccacaggatccgctctggcctggagcaaactctcattttcccaagagagcagcgccccagcctccctccaggccccattccagaatcgcagcctcctcttggtccagaagtactcgtcccgaagcctgctgaaaggctgaagcctggagtcacaggagtggctcctgggcagccatggaagcctccttccctgtggtggcggcagcaaggacaccagccattaatcactcttctctccgttttgtcagacccagcagcctcctgaagatgctgcataaacacatttaacctttaaagggtcgggtggcagccccagggagggaaagctcaacatcctcacccctggggtaagcccccctccctcctctgctctcagactctcctggtcaaggaagaggagggagtttaaaacaagaaggaagggctcttggtgaccctcactccacccgtcaagctgacagagctccggctactgagaatccaggggaggttctccaaggaggacgagggtctaggagagatgtcagcaggagtggctgcgcctgtctgtcatcgcttccccaggggcctctgccactgtggcccctgaggatggggcctttcctgtccacaggagcaagaagcagtgagggtcccaggctgggggaaggggctctgcctggggcctgacacctgggggtctgcttggctggaggggggcctccgccaccccttccctttttctccctcccacattcattcagcaaaatcaggagccgcttccaggttccaggcatggaacctgggaaccaacgatgaaaggagaaagaaaagacagtgtctgaccccaggggactcctggtgggtgcagggtggggagcaggcttgcgagacactatttccataggatgaatgtaaattccaggatgggtaggaaggaggcgctgtggagccctgagaggggaacggagctccagtgctggagaggtggctgtcagagacgggcagctcagcaaaggtgacatttgacctcggtcttacagtatgagtaagagttctctgaacagacagagggaacttgaatgtactggctaggacctgggcggtgaggacgtggaggccaaggctcaggtctcagccaccctggagcgtcagtgaggccagccccgagcaccaagaccacgcagtggacgcagggctctcatggtggatgcgttacctgctgctggcagctcgccccaggacccctcagctacagagacctgcccacggcgacgccctcccctgaggggccacagccaaaggcctgtgctggagagcagggctggctgcctcagcccactcaggacagctctgagggctgccctggccaggctctcccgcagccgctccagcgtccgcctccattgttcctcaataaccatcctgcagactcagcctgctgcctgggaaaccaaacccgcaacacacagagggtgacggtaaagctgtaatttagaaaccaatgggcagtaaaccagatcagaaataaaagctccccatcagctggaaacccaaactcattccaatctcacaaccaaggctcactccctccaaatgcccactatggaggaccacagagatcgaggcttcccggggagccgttcgagattctgtctcccatgttcttgaggttcctaaacccctaaaccaggacaccgcacacccgggacgccaccgtaggatagagggggtttgtcctaaagaaacactgtcacgtcagacatgggatggcctggcgcaaaagaatgcaccacagcttaagtgacaccgaagatgcaaaagccagtgtcccaggatgcggagtaagggcacccagacaccgatgctcagaatatctcagagacacacctgcatcaccccagagacgctggaagccacagagtgcacacagatggctttcttacccaccgtgcatggcctgccccagcaaaaggggccggctgagtttccggggcagcagatgaagaaacctcggctctcagagagggaaatcagaggtaacagacagaactcacctcttcctcctcttcttctctctgtatcactggctaagaggtttgaggtgggaagcaaatgggtggcctttgagtgcttgagtttgtccatcaattacactctcccgcccgagccattgcaacctgctttccatagatatcgtgaacctctggccgggcactgacctaacaccagcttggagtggctgctgaatggcacttgttcatttgtttgtggtgaggaagcttagttgccagggatttgttaaagaagacatcatggtatgttgttcattaactctgacctgcctggctacctttatttgtagtggagagagggaggcattctgccctctggatttctaacgtgccaagcatgtatgacaatggcttacaaatgccagtccctgtggggatggtttgttcccgtgacaatgtgcaggtgagcaggcattttcccctctctcctcctcctcgtcaggcctcagggggttaaaggctgggagcatgaggagtctcagggtggaggatggaggaggcctgaactaggaccaggtggagactcgccccacaggtgagatggaggaagtgacctgggcacagagtgggcttggagtatgcagtacacagtggcccttgtggctggggtgaggcaggtgtgagcccctccggggacagccctgagccagagggtgctgaaggggtcttaccatacgtggcctcaagtagcaagctggtcaccttgaatcccgagagcaacgccaggtagaagcctgaggagttgctggggacaaggcaaaagggctgggcctggggttgcaaggaagcacagtgtgggataggacagggatagcagcccctgaggcccttcgtgtgagctgcaggtgtgggcagggccagaaaggacacacgcaggagtgggcaggcaagagcaatagaacaacaagcagaaccagggcagggccctggcaatggggcctcagccaggcactgagcttccaggcccacccatcagccccaacgggccaggctccatccctgaggactcagggtcaggcagggccaacagaaggccagacagggagagcaggagccaggtgacttccattccagggagcagcgctgcgccaggagcaggagggaggaagagcaggacggggcctccgcaagcctctctggggagcaaccctggagctcagctacctccactgcagctcaggtctctgaggcctgcagctcagcacagcttcttatctgagatgcttcataaagggcccttcccgggcacccctgcccctgtcccccctaaactccgggaatggggtctgcccaggtgggcctgcccactaacctctgagaacccatgcggactgggcatggtagctcacgcctgtaatcccagcactttgggaggctgaggcaggaggatcgcttgagcccaggaatttgaaaccagcctgggcaacaaggcaaaagtctgtctctactaaaaatacaaaaattagctggggacgctgaggtgggaggatcacctgagcccgggaagtcaaggctacagtgagccatgattatgccactgcactccagcctgggcgacagagtgagacactgtctcaaaaaacaaaaagagagaacccatggggactggcgtgagcttcaggtcgtgttgtctgggttcaagatctccatcaggcacttagtaggggtccatcttataagcgaacctgagcctcagtttcctcgtatgtaaatgacaaataacaattattaatagctacctcataagattgatgtgataattttattttttgtactgtttttaaatttttaaaatttctgtgggtacacggtaggtgtacaaatatatatatatatatatatatatatatatatatttatttctggggtacatgagatgtttgatacaggcatgcaatgtgaaataagctcatcatggagagtggggtatccatcccctcaagcatttatcctttgagttacaaacaatccaatgacactctttaagttattttaaaatgtacaattaagttattattgactatagtcaccatattgtgctatcaaatagtagatcttattctttttttaactatgttttgtaccctttaaccatccccaccgcccctccagcttccaactacccttcctagtctctggtaaccatcctttcactctctaggtccatgagttcaattgttttgatctttggtgtgataacttttttttttttttttgagatggagtcttgctctgtcacccaggctggagtgcagtgtcgccatctcggctcactgcaacctccgcctcccaggttcaagcgatcctcctgcctcagcgtactgagtatctggcattacaggcacgcaccaccacacctggctaatttttgtatttttaatagagattgggttttgccgtgttggccaggctggtcttgaactccttgcctcaagtgatccgcccacctcggcctcccaaagtgctgggaatacaggcctgagcctgtgcgcccggtcctatgataactttttaaacaatatacttaaaagatgcttagcacaaggccaagcaaaccctaaatgctcaaaacacactttttaaaacttattattattattattattattattattattattattattattaccagtgacaacttcagtccccgccacagagggctgtagggactaccccagtacattctttttctctatatatttgtctgatcctctggcaaagtgacatttggaggtttagaggtggccgatgactccagcttaaaagagctgtggaaaaaaatagatgaagaaacaggaatcattccaccaagcccacaacctaaaaataagctgggcgtggtggcacgcacctgtgatcccagctactcaggaaactgaggcaggagaattgcttgaacctgggaggtggagattgcagtgagccaagattgcaccactgcactccagcctgggcgatggagtgagaccctgtctcaaaaaaaaaaaaaagaaaaaagaaaatgaaaactgttcagggccatcttctgatgctctcgctgcctctttttttttttttttttttgagatggagtttcgctcttgttgcccaggctggagtgcaatggcacaatctcaactcactgcagcctccacctcctgggttcaagtgattctcctgcctcagcctccctagtagccgggattacaggtgcctgccaccacacctggctaattttttctattttcagtacagccagcgtttcgccatgttgaccaggctggtctggaactcctgacctcatgtgatccacccgtctcggcctcccaaagtgctgggattacaggcgtgagccaccgcgtgcccagacaactcctgctgcctcttcacctctaatgtttcccatctcatctccgaagagcagccaagcagaagctcaaaagaaccgctccagctcccccctgctcccaggacctgctcagacccggggggatgtcatggcccggatctgtctgtcttgtctacaggtagagggcggcttatctgtccccagtagaccctgtctgtacccctctcaccccatgagaccctacctcggcctctccttctcgctgagacatctcctccctccctggtcctccaccttcaggtcctcacggctgagagcccctggcagctccgggaattatcgggcggcatcctgactcccgccttgctcctcagacccctccccacaccctggcccattccgggtacaagggcgacttggttgccttcattatagactatagcacaaaaacacaataaaataaaatgaatgttttctccgcgaaaatccattagatgagttactgttgtaatttaataatgggatgggaaactacagcaagttaccgaagtatataattaaagtaaatctattttaaagccctttattgcttagtatttctcagatcccagtctctctttcgcctccgctcccctccccccaccaccccccttccctttttctgagcctgaggaggaggctgggtgtcacgggtttctctgaaattgtcagtacctcggtggcaaacacagcttcctgctctttccaggagaggatcctatgcctggcatccctgaggccccaggctggcctccctttgtcagagcaggggcagaatgatgctgctactgactgatccaggacccacctctgctagatcctggggagtgaggcttgattcttgccctaaaagcaaagccgccaaaactgggcagagggtgatgcaggggagtagggagatgtctgcactaagaatccccttcacaaaggacagatgccgctgagccctgcacctcagatttgccaatgatcgccaattccaagacagcattgtggttaagacgcagcaggaagctaaggctcagagaggtttggaacttgcccagggtcacacagctataagtgtcagagctggaattggatctcaggcacctgacacaggcccggctgcctccaagaagctcccaagtctggattcctgtgtgctggatgtaaaagccagtgagcctggccaattattgcccattttcaaaggaggaaagaggagaggaaagcttgtggctattacctccatggtcattgtctgctttctgaaggagagccccaggagtggcagagtcaagccacacctgcaatcctgcacaccccaaatcctctctcagttacaccccaacccctccttggtaaagagatgaattaccttcatcagaagggccagggtaggtccttcgggggctcactggaagccctagcacctgagattgacctggcctgccatagggaaggggactctgcagccggccagttcaggacaggaaggggccagccaagcctctggtcacttgaagtgagcttgatgaaagaagttttgtggttcattcaaacacacaatgatgcattctcccccttctagagcccccggaccgcactcagggatcactgtgctactggcagccacagagaaccaagtgacccaaatgaagccacacgggcactttgaaatcacagtgagctcttggcataacagagaaaattactcccaaggaagactctccctgcccactgatgggttttccagggaaagttggacctctggagatcccacgcttccagagaagccagtgtgccaccccagccccgggcatgagtcctgtctccctcctcgcccagcacagagccaagcttctgcaaccaagaaagcaccaggagccccaggcgcctaggggatgctagagagagatgcaggttctgccaggctgtgagtccatgcaaatgagatgcaaagtgatatgcaaatccaagcttccctttctgaatctcaagttgtcatctggtggctgagccctcctagtgctctgaaggccgctgtctccttccagcctcgtgcatatcaaggacagggagctctgacgatggggtgatggggcgattggggaaggcaagcagagttttgtagatggcaggggcaggatggttgccgacccccctgcagacctgacaatccctcggcatacccgacccagtgccgagtttcctggggctcagtggttgccacttccttctttgcagccttcctttttggctccagagaggtgccccaagacatgcacctcaaagccccaagggaatgccccaacccagggcacctccaggttgaatgctcagcgacttcgggaatgcagatgccacacacatccctcacctattgggctgcaagaggtagttgttaaactttggaaccactgagagtgggattctccaccaggattttcaagcttagagccatcttgggctgctttccagatgaaggaagaaagccgagcgggggagtgcgccctgcctgctcagccaggatcgtgcctccgaaaacacacttcagtgtgcccaggagttcaagagctcagggctccctctcagcccccatctggcacctgttcccaggctgggagcacttagaaccttcttagaaagtgctccctgcggcgtgtaagagctgcagggctctgaactagagaaggagccaaaattcataaccatggtgacaaagaggccaacagcagaggggctggccttggagcagccaattagaggactaggaaggtgagagctgagaagggaaggggctctggaggcaaaggaaaagcagacagtgcaagaaaacttcaaaaagggtcgaaggagtaagggtggggcccaaagacaaacaccccccagccccaccctccagccctgcctgaggtctagccgccatgcccacggacctcatgagggcccaagatttctctgcagggctgcggccctcagcaggcccagatacctggtcaaggcctctggcttttctctactctcccttgcccctccaatacctccgcatctgagatgagaagaacattcggggtggaggtgaaaaggtggaagcacaggtggcgtccccctttatatctcagtcagggcatggccttctgaaccctatgctactgggctagtgcctggggtgggaggtgccatcaaaggcaggcaccttcttgccctgtgcagcctgaacgaagccctgttggtcctgtcctctgccccactctccagaggaagagtgagctatttcttttttttttttttttttttgagatggagtcttgctctgtcacccaggctggagtgcagtggtgcaatctcggctcactgcaagctccacctcccacgttcacgccattctcctgcctcagtctccccagcagctgggactacaggcacacgccgtcacgcctggctaatttttttgtatttttattagagacggggtttcaccatgttagccaggatgctctcaatctcctgacctcatgatctgcccgcctcagcctcccaaagtgctgggattacaggcgtgagccaccacgcctggcagagtgagctgtttcataaatcatcctccggtcgtggatatgaacactctttatgcccacagagctgtatacgagaatatgatgtgcttcttcggaccatgggcacgtgctgagcttcagctgcacgctaggctctgtgctggccccagggttcagggatagctggcaggggaaattctctctggcacatccccttttcccttcccatccatgcccacactggctctgtgccttctgcaattaatttcaaaactgaggctccccattgctcctccatggtgaacatgacccagggtacaacaaagccctgagaaagaacaagataattcaccaaactaaatggaaagccaaatcctgacactgaaggtactcccccatactgagagggtgctggcatctcccctgatcattaggcaggccctctgggtaatgttggtggcagcagagtgctatagactgaattgtgtcccctccaaattcatatgttaaagccctaacccccaaacctaacaacgtggtggtatttggagatggggcttttggggacgtgattaacattagatgaggtaatgagggtgggaccccctgatgggattagtgccttaatgaggagataccagaaggatcattccctctctgccatgtgagcacacagcaagaaggcggccgtctgcaagccaggaagagagccctcatcagaatcaaccatgctgctcactgatctcggccttccaccctccagaactgcaagaaaataaatttctgttatttaagcccccaagtttatggtattgcattcctaagtgtactttttagagctgattaacaggcatgcaataaggtttgctttagagaccacaaataactctctagaaacaaaacatggaaacaagagtcttctctgccccagatgccaggatgggagccatctggatgctgcctggattacacactttccctgccaccctcctgtgtgtccacagctggctttgctgtgatctactggaccagcagctgccagccagcccgctgggtgcacaaccccagacgcatgtccttggcctgccttgtggggctttccagccctggccagctctgagctgtatgagtgggatgaagaaccaacagaggaagtttgagctacagtcaccatgtcccaagtgcacactccacctgggcagctcttggaaatcacaccaactctacatgttggttgagggaacaccacaattgctgccattataaacatcctgggtgcaggagtgggctggggggcacatacctgttagtgatggagaagtggggttttatccagctggtcctctgattaaaatcatcccttacagctttattatgtaggtaacactcctagttatctaactaatattgtgctttattgagaaatttctacagaacaagcatttggttaaatactcacatacaatatttcatttatttattctgtgaggaaaggggagatactatctgatatggtttggctctgtgtacccacccaaatctcatctcgaattgtaatccccacatgtccagggagggacctgtaatcccccatatggagggagggaggtgattggatcatgggggcagtttcccccatgctgttcttatgataataagtgagttctcatgagatctgatggctttgtaagtgtttagaagttcttcctttgttcttgtcactcctgccaccatgtgatgaaggtgcttgcttccctttcaccttccgccatgactgtaagtttcctgaggcctcccaaaccgtgtggaactgtgagtccattaaacctctttcctttataaattacccagtcttgagtatttctttctagcagtgtgaaaatgaacgaatacactatctctacctccattttatatatgagaaaactcaggctcatggaggtgagataacacatccagcaccatgcaactaagaagcagtcaagctggattcacacccagatgttctgactccagaccctgcatcttcatcactgtctgctgaggccatccttgctgtgacaacacctggaacaacagccagtgcatggaaggctgtcagtaaatggtggctaccctctcaccctgtcgttactattgtagcatggcctcttgtgtaagtcaaccaacctaagctcccacataggtctctgcatggttttgttaattagcttattagttagggctgcataacaaattatgccaaaacgtagtggcttaagacaacacacatttattattgcacagtttcatggctcagggttctgagcacaacttggctggcttccccagctcaggctctcacaaaactgccatcgaggttggggctgcaacatcatctgaagcctgcctggggaaggatcatgtcccggattcacagaatgcaggcggagaggcaagggcaagtgaaggacttgcccgaggccagcttagcgtcggtgttcacatttcagattcccaccaacttctgtgatgttgcccagccacatagacacatcaaatagataaagatgatgttgctatggagtcctggcataggtagaccagggccagaaatgatcaaggtaatttgcaaatatcaaggcaatcaaccctagactgtgagccccacgagccaggagaatatacattttactcactgctgcatcccagcacctaggagtgcataggactacttcctgcccagccaatagctgctgggtgaaatgaatggttccgttgatggcagcaatcaggactggcttccacccagaggatcatttgtgaagagggggagaaagcaggagaggaggtgtggggtagatagccaggcatgggacggggagcacgcagcacttactcctcctccatgcctgtcttctcatcataaatggtgaataaacacagtgcctcacgcctgtaatcccagcactttgggaggccgaagcaggtggatcacctgaggtcaggagttcgaggccagcctggccaacaaggtgaaaccccgtctctgctaaaaatacaaaaattagccaggtgtcctggcacacgcctgtaatcacagctactcaggaggttgaggcacaagaatcacttgaacccaggaggcagaagttgcagtgagccaagatcgcgccactacactccagcctgggcaacagaacgagacactgtctcaaaaaaacaaaaacaaacaaacaaacaaaaatggtgaataaagaaataacctatccaaggagccagagaaatcttccaaccacctggtcggcctgtgctagtttcaaaggggatcatgtatctacagaaaacacaggtaacctcgggttgcatagggcaagtagggagatgattttccccctagagccgggactacccttccaagccacagcccttcacctttaggaggaaagaaaaggctttttgatgagagtcctctttaaaaggaaagaaatgcagtctcgtcaaaagcccagtggtaacacttccctaacacaatgcgtgctggtgacaacgtctaatgaagacttttatgatagggatgtaattgtaaaaaaaaaaaaaaaaaaaaaaaaaaagattaaaaaattggtttcaatgctttgccatccaagagttcatttgtttcctcattcatgcactaaataagcccctaattaatcttgaacctcggagaaaggcgactagattgccattttctccgtaaggacgcacttcacattttgggaagtttgaagaggctcttcagcattttcctttagtggtattttatcagcattttagagaagcttcattaggctgccgaaagctgctaattgcattaccatatttttaagcctcacgggttcgggtcagattcatcgttctcccaattctcccacgaatctgcaggtttgacatgtcagagatccaaccgttgaggagagaggccaccgttcacaccagcgtgttgctttctcaaggaaaatttagcttcaaaagtcattgtggtgtcaccactcctagggagaaaaaataaacctccagctttccagccaagaaaagaaacacaaaaggactgtgtgtgtgcatgtgcgtgtttgtgtatagatagatagacatgaatatagatgtacaaatgtgtgtttagagatatataaatataatgtatatgcatagaaatgaatatctgtatatgtgtgtgtagatatgaatatatgtatatgtgtgtaaactgatataaatatatgtatatgtgtgtagacaaatatgaatatatgagtatatgtatttatctgtagatagatatgaatatatgtatatatatacctagatatgaatatatgtatatatgtggagatggatatgaatatgcacatatgaatatataaatagatatgaatagatgtgtgtatgtgtatagatgatgtgtgtgtatatctgaatatatgcatagatgtatatatgtagataatgactacatatgtgtgtcacatatgtagtaagtgatgatgcttatattttatctggattctcccctctctttaaagaaaatttcaatggaaaactaatttccaaacctaagcagctgaacacccttccagaagcctcacagacattatctcatttaatcctctctacaaccttgtgaagagttaactactatttctgtcattttgcaaagagggaaatggattctcagagttcataagtcacagaacccacaagtgttagagtcgaaacttgaagcaaggccaagggggtcgccagcatccgtgtttggttggtaatattctgcctgggagtcaggagtctaggaggtgacggacctgggtccaagccagctccgtgcctccacacaagcatcttggccccgctgagtctcccgtcgatgaagtgatgatgtccaccctttggagataagaagatgaaatgagccgaggcgggcggatcacaaggtcaagagatcaagaccatcctggccaacatgatgaaaccccgtctctattaaaagtacaaaaattagctgggcgtagtggcgcatgcctgtaatctcagctactcgggaggctgaggcaggagaatcgcttgaacccgggaggcagaggttgcagtgagccgggattgtgccactgcactccagcctggcgacagggcgggactccatctcaaaaaaaaaaaaaaaaaaaaaagaagatgaaatgagataaaatgtgtaaagcaataaaccctggtccgtccactagctgctcacacaggtgcagccctgcagccctgactggaggcatcgcaagacagctgaaccccataaaaccagggcaggcaccccacatcctcaggagaccccggccaacacacaaatctgggtcctgccagccggcaccactcagagacgggatggggacagtcccatcttctggcttgaaaagacttacccggtttctcctctcccgaacctcacccctggagtctaaatagacactgtgttgggtcgggttcccggctgggcattgacacttttacccctcctgctccatttctggtctccagagtcttttttcttctaacacaagtgtctgggacccagcagccacttttcaagcagagctccccgacatgccttccctcctaccccctccccacctactcactctccatctctgatgctccatgcaagcacaggaatgacggagctgggcttcggggcagcagaaagagatgactgagagaccccctccgactgtggcctctggtccctgagattgccacctggggcatgccggctgcaactggggagggttttaggcactgacagggcccaggaagggctcagcgattggcgaagaggctctgtgttcacacaatgacagcctccggaaatgtgcaggccccccgagctgggaacacagggtctctgggccagcactgcccaaggaccatctgagtctttattaatcacaaaataaggagatccctccaccccaggctaccaggcaagggtcacctggtctgcccaaggaggaaggggacagcaggtggccacaagagtctccagggcaagacccagctggttccctcctgcctgtggcctgctccccaggaagcccaaaccgtgtgcaccatgcccagcaagctggacgctgcccttccaccagccatgcgggggattgggtggggggtgttggctacagtgggtctgatgcctgggaatctctggcttctctgctgcattggcaagattgggggataagcagacgggcttccggtttgttctgtaggaactgtctgtgtccccatgtcttacagagggaggatggcagcaaatggggtcgggaagttgctggcataggaacctgagagacagacaggagtatcatttgcagcttgggttttgcactcaggtagacacgggtccaagtgttggctctgccacattctacatgggtggccttgagcaagtgacacaccctccagaaacctgtttcttcccttgcaaaatgcagctaagattgtcactacttctaggattgctacaggattaaatgagattaaatgacacttaaataaagatcaaatagggccagtcattccagaagtatttcttttttttttttttttttttttttgagatggagtctcgctctgtcacccaggctggagtgcagtagcgagatctcgactcactgcaagctccgcctcccgggttcacaccattctcctgcctcagcctcccgagtagctgggactacaggctcccgccaccacgcccggctgattttttgtatttttagtagagacggggtttcattgtgttagtcaggatggtctcaatctcctgacctcgtgatccacccacctcggcctcccaaagtgctgggattacaggtgtgagccactgcgcccagcctcattccacaagtatttcttgagcagctacactgggaatacaagtccctggccccacacggcacatgagctagctgaggagacagataatacaccgggaagacaacaagcacgacaggatcgatggcagggagtgctgcggaggagaaggaggaggtgccatcatgaaaacagcagggaccggccgggggtcagtgcaggcctggtgcttgggccaagggctaagggatgagaggagccagccagctgaggatgggagacccaggcagaagggggtgtgtcggccctgagtggggaagggctcggtgtgttgaaagaactgaaagtggtcagtgggctcggacagtggtgagcagggtgagccacgcaggcacagggctcgtgctccatcactgtggggtggcaggccctgcagcaagggtacctgcccatgaccacgccccttcccatcaggagggcttcccaagagagcttcgtctcctgccccgaggaagctttccactgacaaatctacatatggagcccaggaatggccgggcgcagagaacccacaaatgtactcagatcccatcccaccctaggacccgggcactaaatcgtaaacaatatcacatgccctgaacgctgttttcccttctaccagggaatcctattttattctgatttctcttttggctgatctcactagaaactcaggccaagagaaaacacatcatacaagaagctaggaaccatattctattccagaccattcatatcctctctctctctgcctctctctctctctctccttacacacacacacacacacacacacacacacgccagccataagtcaaaacaagggctacagcgaactctaaagattcacaataacacagctatttccacacctgtgcaacattaacctactatggtcttcaccaccaaagagtgattttttaaaaaaacaagctaacatacaaacccaacaaaacagttgtcaaatgtgggtgatgtgggttttacatgtaaaacatgcacacacacgcatacacacacacccatatgcatgtatctgcctcaggcaatgaaattacccacatgttgcccttgaagtatagagatttttatcccatttaacagaaaggggtttgaggccccgtcactcaccccagggaacaccgtgactaagctggagggcccggagatgctggcagtgctcccactctctgaagcctcctggcactttgtttcctgacaagtgacacttttggcctgccttttgtcctggctcacttacctgagagcagggaccatggctcctataccttggtgtctgtccctaggacctagcctggtgcctttcatacagtaggtgcccatgtagcacctattggatgaaatctccacaaagcataggttggtaggaatcaaggcatagaaagggtaacttggggtccccacagcaccgccctttccccgctcccacttcaacactgtcccacctgcctggaagccctgccctccccacacctcaccccaagatgaaacgcccaactcagacatcacctggcttcctctaggcgataaatttcaaaacagaaacatagggaatgaacacggatgaccccctcgttttctgagtaagtatcattttcaaagcatttgccgtcccacatcactattgttttacaaaataaagcactttctaacaccaaaaggtagaagggatgtactctcagcagacagagctgtccttgaaaggaccgcgcccagctttgtgagaaactcgccactctgtcctggttcttttcatcttgtctccaaccacagacccgcatcagatgccggagccgcgtttaggaagcgccgtccgggaggacagccagtggtgccaacggggaaaggagccaggccaggaagccagaagcagcgtgagagggaggcggctcccagtcagaggagtgcagatgtagaggaggtgcccggggtcctgaccaagaactcccgccccaccagagaactggagtccagagctgggacgccagccaggctggagcagggattcttctggagagctgagcgaagaactgcaagtcctaacgactccctctggaccccgagagcctttcagcttctcagttcgagagcgggtggcaaactgtgttccaggctggatctccatccagtctctaattttacacgaacgtggttctcattttccaccgtcgttccctgtgaaattcaagaatgtagtggtcaggatgataagcaggaaacaagggtgaggagggctacctgccctctcaaggctaacgggagaccccctaacttccttggccacctccccatcccacctgccgcacccgcagcctgtggagggggccctgcaaacatcagctagaaagcctgggcagccagcccgccaccccagagccacccccatcctccgctccacccctacgtcccacaccccatccagccacacacctggcacacaagaggggagtgccttttccatgccaggcacacacgcaattctcctccaccaaagcgaccggcctgtgggccttccctcactgggccacgtgggaggaaacggggattggtcttggaggctttcctgccccttccccttctccgccaggccccctctccctgtcctcacgctgcatctcctgggtggttctatctggggtgttaatgtttaagtgtgatcgatggctaatcccagggggccttggatctggctgcaacctggtgagaatcactgaggggggctatacaaattgggggtgcctcaatgtaccagcatctctgggacacatttaaagcagtgtgtagagggaaatttatagcactaaatgcccacgagagaaagcaggaaagatctaaaatcgataccctaacatcacattaaaagaactagagaagcaagaggaaacaaattgaaaagctagctgaaggcaagaaataactaagatcagagtggaactgaaagagatagagacacaaaaacccttcaaaaaatcaatgaatccaggagctggtttttggaaaagatcaacaaaattgatagactgctagcaagactgataaagaagaaaagagaggagaatcaaatagatgcaataaaaaatgataaaggggatatcaccaccgatcccacagaaatacaaactaccttcagagaattctataaacacctctaagcaaataaactagaaaatccagatgaaatggataaattcctggacacatacaccctccaagactaaaccaggaagaagttgaatctctgaatagaccaataacggctctgaaattgaggcaataattaagagcctaccaaccaaaaagagtccaggaccagatggattcacagccgaattccaccagaggcacaaaaaggagcttgtaccattccttctgaaactattccaatcaatagaaaaagagggaatcctccttaactcattttatgaggccaacaccatcctgataccaaagcctggcagagacacaacaaaaaaagaaaattttagaccaatatccatgatgaacatcgatgcaaaaatcctcaataaagtactggcaaaccaaatccagcagcatatcgaaaagcttatccaccacaatcaagttggcttcatccctgggatgcaaggatggttcaacatatgcaaatcaataaacataatccatcacataaacagaaccaatgacaaaaaccacatgattatctcaatagatgcagaaaaggccttcgacaaaattcaacagcccttcatgctaaaaactctcaataaactaggtattgatggaacttatctcaaaataataagagctatttctgacaaacccacagccaatatcatactgaatgggcaaaaactggaagccttccctttgaaaaccagcacaagacaaggatgccctctctcaccactcctattcaacatagtgttggaagttctggccagggcaatcaggcaagagaaagaaataaagggtattcagttaggaaaagaggaagtcatattgtccctgtttgcaaatgacgtgattgtatatttagaaaaccccataatctcagcccaaaatctccttaagctgataagcaacttcagcaaagtctcaggatacaaaatcaatttgcaaaaatcacaagcattcctatacaccaataacagagagccaaatcatgaatgaactcccattcacaattcacaagagaataaaatacctaggaatccaacttacaagggatatgaaggacctcttcaaggagaactacaaaccactgctcaacgaaataaaagaggacacaaacaaatggaagaacattacatgctcatggataggaagaatcaatatcatgaatgtggccatactgcccaaggtaatttatacagtcaatgccatctccatcaagctaccatgactttcctcacagaattggaaaaaattactttaaagttcatatggaaccaaaaaagagcccgcattgccaagacaatcctaagcaaaaagaacaaagctagaggcatcatgctacctgacttcaaactatactataagactacagtagccaaaacagcatggaattagtaccaaaacatatatgtagactaatggaacagaacagaagcctcagaaataacaccatacatctacaaccacctgatctttgacaaacctgacaaaaacaagaaatggggaaaggattccctatttaataaatgttgctgggaaaactggctagccatatgtagaaagctgaaactggatcccttccttacaccttatacaaaaattaattcaagatggattaaagacttaaatgttagacctaaaaccataaaaaccctagaagaaaacctaggcaataccagtcaggacataggcatgggcaaggacttcatggctaaaacaccaaaagtaacagcaacaaaagccaaaatagacaaatgggatctaattaaactaaagagcttccgcatggcaaaagaaactaccatcagagtgaacgggcagcctacagaatgggagaaaatttttgcaatctacccatctgacaaagggctaatatccagaatctataaagaactcaaacaaatgtacaagaaaaaaacaaacaaccccatcaaaaagtgggcaaaggatatgaacagatgcttctcaaaagaagacatctatgcagccaacagacacatgaagaaatgctcatcgtcactggtcatcagagaaatgcaaatcaaaaccataatgagataccatctcacgccagttagaatggcaatcattaaaaagtcaggaaacaacatatgctggagaggaagtgtagaaataggaacacttttacactgttggtgggagtgtaaattagttcaaccattgtggaagacagtgaggcgatccctcaaggatctagaactagaaataccatttgacccagcaatcccattactgggtatatgcccaaaggattctaaatcatgctactataaagacacatgcacacgtatgtttattgtggcactattcacaatagcaaagacttggaaccaacccaaatgtccatcaatgatagactggattaagaaaacgtgacacatatacaccatggaatactaggcagccattaaaaaaaggatgagtttgccgggtgcggtggctcacgcctgtaatcccagcactttgggaggctgaggcgggcggatcacgaggtcaggagatcgagaccatcctggctaacacagtgaaaccctgtctctactaaaaatacaaaaaattagccgggcgcggtggcgggcacctgtagtcccagctattcgggaggctgaggcaggagaaaggcatgaacccgggaggcggggcttgcagtgagctgagatcgtgccactgcactccagcctgggtgacagagcgagactccatctcaaaaaagaaaaaaaaaaagaaaaagaaaaagaaaaaaagatgagttcatgtcctttgcagggacatggatgaatggatgaagctggaaaccatcattctcagcaaactatcacaaggacagaaaaccaaacaccacatgttctcactcataggagggaactgaacaatgagatcacttggacacagggcggggaacatcacacaccgggacctgtcagggggtggggggctgggggagggatagcattaggagaaatacctaatgtaaatgacgagttgatgggtgcagcaaaccaacatggtacatgtatacctttgtatcaaacctgcacactgtgcacatgtaccctagaacttaaagtgtaataataaaaataataataatataaataaacaaaattcgtaatttaaaaaaaggccaggcatggtggcttacgtctgtaatcccagaattttgggaggccgaggtgggcaggtcacctgaggtcaggagttcgagaccagcctgaccaacatagtgaaaccctgtctctactagaaatacaaaaagtagccaggcacggttgtgcacgcctgtaatcccagctacttgggaggctgaggcaggagaatcacttgaacccaggaggcagaggttgcagtgagctgatatcgcgccattgcactccagcctgggcaacaagagcgaaactcaaaagaaaaaaaaaaattgggggtgcccaggcctcaccccagagaccctgatccaacaggtcgaggtgcggcccagccatcgaaggttttaaaaggtcccccgaaaattctagtgtgccgttcaattgagaacctctggtgccaaaggccaaagaggcacccccgtgggaccactgtgttaataaattgcctcccagtcttgtcatctggacagaatgaagctccagggctttgagtgatttagagcagaaccacatgacacttgggggtgggggctccaacttgagaagccatcccaacaccccaagacaggcactgacccaacacaagaaatgtgcccttctacttcccactcccattccctgggtcctccctctccccctctcagattccaagctgggctccaggctcaacgccaattctctgaaacccaactctccgaagggggccaactcagggagttgtcttagcaggcaagtggggactggccatcttccagtaggacctccctctgtgctagttgtaaggatgaagtgagatattaaatgtaaaatgttttacttttttttacacgcgcatggcgtatacacatgcttcatagaaccacgtacgcagctctcagaatttctcttttgcacccatttcaactgttcagctcttcaatccatcttcaattcctctttctctgctccccgaatatccccagcgtcactgcctcagcccagcacctggcgcagcagagtgctgcccagaggtggcgctcagtgaatggctgaaatgatgggataaatacaggttagccccgagcggcaggtatatctgaacggcaccaccatccgccggccactccaggtggacacctgggcccagcccctcactccccactccccctcaccatcctgagcctggcaccaaaccccccgccccaccatcctaagactgcaccatcctcctgcccttttctctgcagctgccccacttccactccactctccaaatcaggttggtctttgtccactggaagatatacacatgaaattacttactaaccattccactttacccaagtgatttgctttttagaacacaaacttgaactgagtcgaggtcatttttcctccatgaaagacatcttcactgggtgcttccgattcagcacacattcctgagagctgagaacagaggggtataatcccatgccagaccaagggagtgtggttcctgggacgggcacctgtctcatgggacctctctgtgtgcctcagtttcctcatctgtaaaatgggagaattacaggagctccctgcagagttgttgtgaagattaaatgagttgctacatgcaaaacttggagcgcagcctggtccagtgtgttaacattattattatcaccatcattattatttttaggtgtgcagaaaaagggcctgaggactgcagttctacacggtagcaagtgatggctacaaagttgctcagttggtcacttccctcccctcataaaaatccctccatggctccccggtgccctcaggcaaagtccttcaggatctggtccctgctgatctggcaatctcattttgcaccacacacgcccaacccagtcagctgcagcaaccaacttctctggaccaggtggtgattggtcagcacagggttagccctgaaaaaggtttgctttaaatctgttaatgcggcagggtgagtttgcacagcatcagatcactatccaccctaggcggtgtcctctggtttaagggcaaaatgcaaatgatacatttggaaataatcagcaaccaagattacttatctggggcaaggagctcttctttccccagcaaatgctgccctatggggtctgccatatttcccgaccgccgcttgtgtgtgttgcaggcatcttatctcattcgacattattattttctagaggataagatagcaatgtttgctcaactcagtattatcaacccatgattgcagctacctgtactttatattcaccgccaaaacagaaaaacatcctaagacttgtgaaatcaacctgaattggggggtaggcgtggatataaaagaaagaagaccatcgtaagagctcaggagtaacatattatcctgattaagtatgggggaggagttaatgcactgaggttaaaaatgcatcgtttttcttttcttttttttttctttttgcaaattgtgttcttgtgtgtttcatgatgactgatatgatatatccttggctttcagagcaagaaaagtcatcagggtttcatttgttatgtttatgccaagagaaatcaatctccacagacacagagaaggctgctcacactcacgatgctgtctggggaatcggccagtcacgcccttggcggacggcagaagagatactgggtaagatatgctttgggcttattgattacaaagcttcttcattacttctgtggagctgcagatcaataggctcacagaaacataatagatttttttagaaaatcaattaaacagaatattttttacagaattgagtttgcacagccgtgtcgttggtgtgcagcttcacatttttaatgcagtttctctgtaagagccacgttataatgaagaggtggcaaacccttggttaaaagttcacgcatagcaatacgaatgggtcagattagagggagggagacaggaccgactctccagggaaagcagagagcatcgcagccgcagccttgctggagagcagtggtgtggggcacctgacctgcctattgcctacatatcatcatatgggcaaaacctatccgtgtgcctcctctcagtctaaaaaacggaactgaaacttcttggaaagctcagattgacgtctgaatttccccattctgaaagcagaaggaagctcagcaggcataaaggtgaaatacagccaggctgtggctgtccagatttgccgtggcgtacacgcggctttcttttctaagctgtagaggagtagctgcaggagctgagacgtggggttcaggcttcggaacagtggtggggaggggctttggcctgaaccccaggcccatgggccacacacatggagcttttcaggtcacaggtaggtaagccatttcccacagtgccaggtttatgcagagtgacccttgcaggcgtgctgcagtgccccaaatcacagtcctgagccagcaggggctgacaccatccctgattcactgtgcttccctcctgttgccgtgttcctcctggtttggtatgatcctggaagacaggcatgaagaagaaagagaagaaggagaaggaagaggaggaggaggaggagggaggaggagggaggagggagaggaggaggagaggagaatgaagaagggaaaagaaggaagaaggagaaggagaaggaggaggaggagaggagaatgaagaagggagaagaaggaaggagaggaaggagaaggggggggaggaggaggaggaggaggattagaagaattattagccatcctggctaacccggtgaaaccccgtctctactaaaaatacaaaaaattagccgggcgtggtggcgggcgcctgtagtcccagctactcgggaggctgagacaggagaaaaaaaaaaaaagaaaagaattattagaagaattactacaagaattgcaagaagaaagtagaaattcccctcccatttctgggaactctacgaagaaccgctcacacgtatgcggtgagaaacccagcaggaaagcctcctgaaagtactccagctctgccgaacacaggacttcaatgttcccaacagtgcatgataaataacaaggctataactccacagagaagcccattgatgacatttagaaatctcccttagcttcgttctcatggtttgcatcgtcagaaccccaggatggaatctcaacctcaattgatgtccatttcgggggtggatgttgttgaatcgcacttcctttgttctggctcttgtccccttgggcttgttctttggtaggcccggtgttcctctggggggcctctcttccttcccgctccaccccagggaaggacagagcgttctgccctctgaaaatttagattatttacatctctaaaggggcatcactaaaggagcagtgtctgggctttgagttgcttctaacacttctctgtaaattctccccattttgttttgttttgtttttaccctgaattagtaagattctgaattgaatcctgaaacctggagtgaaatatgaagtcctcctttctgcagggctagaatacaatcagacccccaaatgaagctaaggcagcaggctgagtttgcctggagaccaacacgtgcccgaaggtggagacattcattcccttgttccttcgcctccctacaggtagcatcactggggagcaatccaagggtgctgaggctgcaagtgttgtttgagaaaaggggaacattagaaggaagtgcaaatggaagtctttctgatccaatgatttggggaaaattatttcttccaaggccatgtttccagcccaatggatttcatggcacctagtatgtatctcggcaaaacagcaactgagccatccaaggatccgcattaccttcttttcttttcttttcttttctttttttttttttttttttttgagagggagtcttgctctgtcgcccaggctggagtgcagtggtgtgatctcggctcactgcaagctccgcctcctgggttcacgccattctcctgcctcagcctcccgagtagctgggactacaggcgcccaccaccacgcccggctgattttttgtatttttagtagagacggggtttcaccgtgttagccaggatggtctcgatctcctgacctcgtgatccgcccgcctcggcctcccaaagtgctgggattacaggtgtgagccaccgcgcccggccagcattaccttcttttcaagggcctgtctcccttgcctccataactgttgtgggtattgacggccaggcttctaaaccccttaaaactccccaactctagtgccaacttggacaacattcttttatgcactcctttttagttatccccacctgcccagctccattattaggtcgagacattttaactaaattatctgtcagcctttcacgtttaatcgttcaaaactcgacctggatccacaatagacactagaatgcaagactctgagaaaactctagggaagaacaatagcactgccacaaaaaacaatgtggaaactgtcaggcctctgagcccaagctaagccatcatatcccctgtgacttccacgtatgcatccagatggcctgaagcaactgacgatccacaaaagaagtggaaatagccttagctgatgacattccaccattgtgatttgtttcttctccacccttaagaaggttctttgtaatctcccccacccttaagaaggttctttgtaattctccccacccttgagaatgtgctttgtgagatccacccgctgccagcaaaacattgctcctaacttcaatgcctatcccaaaacctaaaagaactaatgataatcccaccaccctttgctgactccttttttggactcagcccgcctgcacccaggtgaaataaacggccttgttgctcacacaaagcctgtttggtggtctcttcacacagacacgtgagacagaaacaagaagctccctctatgtgccctgtagggacatttttcttggagaatcgtaactctaaattcttacctcgcagagagggacccgatgggacctgtttagtaaatattactgagttctgccacttgtcgacaatcttccagggagataactcctaattaattagaaaaagtgcctgccctcgaggcgcatacattctatgagtgagagaaacagacacagatgtgacatggatgccgcagcgcaaggattttgtctgcatgttcattgctgagtccccacgtttagaagggtaccctgcatacttacctggcagaggagacaccatgatcacaaaggtggttttcccagggttaggctcacattccaggtgtgctgacccctgcaattttcccaaatgcaggaaattcaactgcataatcggtgggggagtgggggggactgtgtttgcgctttcccctgtgggttttttttttttttttctaatattaaaaaaaagaagaggctgggcgtggtggctcacgcctgtaagcccagcaccttgggaggccaaggagggtggatcaactgaggtcaggatttcgataccagcccggccaacgtggtgaaacgctgtctctactaaaaatacagatgtggccaggcacagtggctcacgtgtgtaatcatagcactttgggaggctgaggcgggtggattacccgaggtcaggagttcaagaccagcctggccaacatggtgaaacccccgtctctactaaaaatacaaaaagtaggccgggcgcggtggctcacgcctgtaatctcagcactttgggaggctgagacgggcagatcacgaggtcaggagatcgagaccatcctggctaacatggtgaaaccccatctctactaaatatacaaaaaaaaaaaaaattagccgggagtgatggtgggcacctatagtcctagctacttgggaggctgaggcagaatggcgtgaacccaggagatggcgtttgcagtgagcagaaatcatgccactgccctccagcctgggtgacagagcgagacttcgtctcaaaaaaataaaataaaataaaataaaaataaaaaataaaaatacaaaaagtagctgggcgtggtggcacacacctgtaatcccagctattcaggaggctgaggcaggagaatcgcttgaacccgggaggcagaggttgcagtgagccgagatcgtgccactgcactccagcctgggtaacaagagcgaaactccatctcaagaagaaaaaaaaccaagaagagtgcaggctctcagtgaattatgaaccagactgagtctgtatcatggcatatgtcaggtggtaacaagtgatgtgtgtgccgggaaaagtcttcataagcacaaaacataaaggccttacaggtgctgagtgtaaatagccttgaccctgaaggaggactgcattttatagccctcaaaatagccccacactcaccctttgcacacctcacaatcaagcctatggaccccacacacacacacacacacacacaccccacatgcacaggcacacatgtcatctcatctacaacagaacctgctgtccacaggcattttctgcagtgccatgcctcaggcctcattttcacacccagtgtaggtcatttttaacccactccccatacaacaaaaggatttttggtaattgtggtggactgaataatgaggccccaaaaatccaggtcctaatccctagaacctttcaatgtgaccgtatatggaaagagggactttgcaaatgtgattaaattaagcaacttgagatggggagattatcctgttttatctgggtgggccctaagagtcatcaaatggatcctagtcagaggaagacagagggagacttgagagcagaggagactgtgtaaccacgaaggcagagattggagtgaagggctctgagaatttaggaaggggccctgagccaaggaatgcaggctcaaaaccagcacagactccaagtaagtccctagtgcagcctctacgagctggaaacgacaaggcaaggaatgcctagcaagagcctgcagagggagcgcaggcctgccaacacccggatgaaacccatttaagacttctggcctccagaattgtaagataagacatttatgctgtggccgaagtaggagcaatgcttgaggccaggagctcaagacaagcctgggcaacatagtaagaccccaactctacagaaaatttaaaaatagccaggcatggtggtgcacgcatgtagtcccagctacttgggaggctgaggctggaggatcgcttgagcccaagagttcgaggctgcagtgaaccaaggtcttacccctgcactccagcctgggctatagagcaagaccttgtcttaaatacataaatacatttctgctgcttgaagccaccaagtttgtggtacaatttgttacagcaaccgtaggatactaatacagctataaagtaatagacgttcttttttggtttatgatttaaaactgttttcatagaagaataaattttcatgttaaaaaattattcaaattcagtaaaatatttcatgtatgaactaaaatttgtatttaccaaacacttctccttgcagttcacactgtttcactctttgtttttttgtgatgaagttttactcttgtcgtccaggctggagtacagtggtgcaatctcagctcactgcaacctccacctcctgggttcaagtgattctcctgcctcagtctcctgagtagctgagattacaggcgtgtgccgccatgcctggctaatgtttgtttttttagtagaaacgggggtttcaccatgttgcccaggctgctttcgaactcctgacctcaggtgatctgcccgcctcagcctcccaaagtgctgggattacaggcttgagccaccacacatggcctctttcactgttttaaatttgaattgcagataaggaggatttgtggtcacacagaatgacggagctgaaagaagtccagctctgttgcttcatcgttgcaatccctgtgctgtcattgtgcatttctaatctgtttaatgaaggagaatgtaattctgcaggggttggttacatagactacacccaaggcgcctcaaatgattccacaccttagaaacgtgaaaaccagtggccatccttgtgctgggagctgactgtacaactggcattttccaaattaactgtcacaaagaatgcaatgtttatcagagtaagtaataaaaatgtgctaatttgaagcttacatatatattattagaactcaacagtaagcagaacttgtttagaacagaggccaaccaaaaaaattttcagggacattgtttagaagtgcggatgcacgatgttaataaaaagcagacgaacttttagccagttttattattgtttgtaaatttcctacggatactgcatgtgctcactgcctgccctgggtggcacactgatttctcgtggtgcaggagaaaggaagactgttatcttggcttagatgctaagccttcctcgggccccgctgtgcctagaaactgagtgaaacctccagggctgtgcctggtctctgagcgcagtgctcagagagctggtgggcagaggacctgggaggagggaactccacaaaggcccctgaagctctaactgggtataaagtcgaaggaggcttccctccatcctgaggcagggcagcttgcaagggatttgagggcagggccagcctagacaaaaccagcacagacccccagtgggtcgcctgtgcaggcccttctcccctggggtaccccagccccctgagcctgacctcctagagacttgtcctccctcccagcctttggaacttcctacactgcccttaccccctcatccccagggacacacccccgacctggaactcatcgctcagctagagaccagccaggtgccaccctgagtggctggccctgcaaatggaggggatctggatgtctcctggcatgtggcggtgccaggctggtgaaggaatgaagtcaccaggaaacagagaggcagtgggaacaagaaagcaagaaagcagaggccacctggcccacaccctccaaccaccctgcacctgcacctggttgctgcttcctaagcatgcgacctttctcccctgaatgccccaggttgcaggtggcctcttggtgacaagaagactcagaggtacttatacactttggagtcgagagaaagggattcaaaccctgcctgtcccctgtttgccctcgggcaacattccaccccccagaaaatgagactggaactgggcacagtgattcacacctgtaatcccagcattttggaaggacaaggtgggtggattgcttgatcccaggaatttgaccagcctgggcgacatggtgaaacatcatctctacaaaaaatgtatgtaaaaattagccaggcatgctggcacgtgcctgtagtcccggctactcaggaagctgaggtgggagaatcacttgagcccacgaagtcaaggctacagtgagccatgatcgcaccactgcactccagcctgggcaacaaagtaagaccccatctcaaaaaaaaagaagaagaaagaaagaaagaaagaaagaaaaacaaggctggaaggctgagcagggtaacggtgcctgtgaggatacctggtgcaagggtgggcagtcagccttcacctcccactcccctccttctgggcaaatgctcatgggcacatccaaatagtagggcacagtgtcatttgccctgagcccctcttccctggccccacaaccaggaaggggctgacttgctccctagagttagcttccaccatttaataggagccttttggagagatggcaatcattttcagcagtctcagtggaggaggcattcaaggactttagggtgacacccaaggtggctgctggggcaggcagccctgttttgagttgagctggagtgggaacagggtgggagaaggaatggagggtgagcagagaggcagttcccaccctgtcggtatgcaaatcacttgctgctgagataaatgatccggcaggatggcaggcagggttcccagcgggagtcatttgtcatttctactcctgatgtgtgagtgagagagtgagagcctcccccatccctccccgcgacacaggtagctcagccaagccccaggtgcccgggacaagaggcatctcccagacctccacctccccgagtctggagaggggcctgcctggcacagtcctggacgtgggttctcccagcgctgagcatgggagaatactccttggtggccagagagtgggccctttgtctcctggaaggacgatgtcaaaccacaaacctccctctcttggcagtcagctccctggctagttgacaaggcgtgcgttgctaagattattcatgacatcagcagagcccaaccatatctggggttcacagggcgggcctggcacagagcagggaagggtcaggccaggttgtgttccagcaagaatgtgcgtcaagtttggaccccatgggttcgtgtgtaaatgattgatgaagggacagatgaatcaatcaatcctggagatcctgaatttgccagaaatccaatccaaccatcccgccctttcctatttgggctcctcgtcttgagagcaaacgcttgagaacatcacactaggaaggactcagaatgtcggggaacagatgccaggcagtagtgatttactaagagaggaatgggctgcccgggccgggctcggtggctcacgcctgtaatcccagcactttgggaggccgaggtgggcggatcacctgaggtcaggagttcaagaccagcttgaacaacacggagaaaccccatctctactaaaaatacaaaaaaaattagccaggcatggtggcgcatgcctgtaatcccagctacttgggaggctgaggtgagagaattgcttgaacctgggaggcagaggttgcagtgagccgagatcgcgccattgcactccagcctgggcaacaagagcaaaactctgtctcaaaaaaaaaaaaaaagaaagaaaggaaggaaggaaggaaggaaggaaggaaggaagaaagaaagaaagaaagaaagaaatgggctgcccttcctcacagccagggatgctgtccccacccacgctgataagcttccagcgcttagagacggtttcccaccatccgatggctgggctggtgcgtccagctagagctcagaacctgcccttagtaggagcccaataaatattcgctgataaacaaacaatcagagaaggccctcataggaccacatggcatggccttaattctggaaagaattaaaactttttggcacagttagggattgaacttacaacttggtgtaaaaagcatatggtctcattttgttcttttattctcttgttctttcactcactcactcactcattcattcaagaactatttcttgaggactcactatgtgctcagcattggacaatgatgactctcagtatgtcatgggttgccagtgagcaggaccctgaacagcgaccaggggcctctctgctgacaatggccagaagtttctagacacaaagggccccacagctcttggtgaaccccagatatcactgggctctgctgatcatggaaaatcttcgcagctcatgcacaggacgcacatttgtcaattagccggtgagttcacaagccaaaagaaagtggttcgaagctttccgttgcctttccagcagatggagtgtcttggccaaatcccagcaccacccaggctgcctcctcgggagggttcttccttctcttgatggagaggggctggacaggtctgccatctctcacttgaggtccccatcagaacactctgaggtcaactccacctacagcctcctaccaccaaaacttgggaaaactcctgaaaggcagatttgattcaactcacttcagcaacacattctttgatacctacgacgcgcaaggtcctactaaggcagggcaagcgagctgtaagatggggcttagtccatgagggttcttggtcttgcccaggaaataattcaaaggcaagcagggggtagaagaaaatggctttgttgaagcagcagtgttacagttgcgtgacagctccatgactgcccctgcagagcagggctgccccataggcagtgtgctgagagctgccactcagggcaggttagcagacatatttatacccacttttaattgcatgcagattaaggggcagtttatgcagaaatgtctagggaatgagcagtaacttttgggtcatcaacattgtcatagaaagaggcggtaattcccggctgttgccatggcaatgggaacctgacatagcacactggtggccatgtctgactggaaagctgcttctgcactggtctggttttagctagtcctcaatctgttccagtgtctgagccccacctctggagtcaggtcccacctcctacctcattatgttcaaacttaccaggaggaaaaagacccagtctcttttatgcaggtactgatgacctagagaagagagacacaaacacaagtagctataatgtaagagggaggtcaagggttgccgcccacaaggagatgaggtcacaggggatgcgatgctggtgagaggtgagccagggctgctcaggggctgggaggcagggtcagcaggtgacagcaatggcatggcagcttcctcaaaagaagggggctggggtgggcgtggtggctcacgcctgtaatcccagcactttgggaggccaaggcaggtggatcatctgagttcaggagttcaagaccagcctggccaacatggtgaaagcccgtcactagtaaaaatactaaaaactacccaggggtggtggtgtgtgactgtagtgccagctactcgggaggctaaggcaggagaactgcttgaaccggggaggcgaaaattgcagtgagccaagatcacaccatcgcactccagccagggcaacaagagtgaaactttgtctcaaaaaaaaaagaagaagaatgggagctggaacctggggaggcgacagggaacagtgtcagttgggaatcccccatgggcaggagctcagggcatctcttcccatccgtgaatgggccagaggagcagagacacaggtgaagccgtgggagactgccccctgagggaggtgtggcagacattgcaggggatccaaattcattccaagaagaggatccatggcactctgcaggggaaactgaaggatgtgtcaggcgcctgtccactcagaaggaaagggcttagaaaggggcagacaggaggcctggatggggagggtggaagaggacaaagatggacagcgggcaaggggatctcagaatcaaaaccagagggccgcatctgctgcctaggcgtcacacaaagcctctgcagagcctgcagcgtgagggcaatgtgcgtttgctgcgtctgttgccatgtgcccatgtgtgcatctgtgacacgtccccagtcatgcgtttgctgcagacccagccagtgtgcattccctgccctctcagagctcatgttccacttggggagagaaacaacaagcaaacggacatgctgaatgaagaaaaggaagcagggtgtggggagggtagtgggaagggtgcgcagagaggaggatgggttacgagcctacattcaaggaactgaagaaaggtctcctagctgagcaagatggctcatgcctgcaatcccagcactttgggaggccaaggtgggcagactgcttgagcccaggagtttgagaccagcctaagcaacatggtgaaacctcatctctataaaacatattttaaaaattagccaggcgtggtggcatgcagctgtagccccagccacttggtaggctaaggtgggaggatagcttgagcctgggaagctgaggctacagtgagctgtgatggcaccactaaacctgtctcaaaaaaaaaaagaaaaaaagaaagaaaagaaaagaaaagaaaaaagaaaaagaaagaaaagaaaggagaaaaggtttattttctcctggaaggagtaacccctgagaggctggcttttttgagtctcctttcaccctccctgggaatgtgggctccagcaggtgcaccccaccgatcccccctcccccaggctgctgtcgaagggccacaagggagtagctggctttgatggtgttcctgtggtctgatcctctgggttttatctgagcctggtcccagcaggtggctgtggggcccagcagggccacctgaaccccactgagaatgcattctctgatcttctctttcttggctgtggagaacagaagttgaaggaagattgcagctttggaaaaaggcaacctcaggaagcaaagttcattctcagttccaacctgggagaggcacagagaccccacagttctccctctgggaacagcaggccccagcctgacgcaggtcctctccagtcggacaccaccaccatgatcccagctggtcctcagaggggctgctggcctccaaagcctgcttccaacactgcagggtgcagtcatttctttcttgtccatcaacatcccccttcctgcgtgagagtccacccacagacttctcccatccagaagcagctttacgggttttttaggggcctattgcctgccctccagcgccaggagtctctacccctgggatcaggaaatgggggctgcgggcagggttacagggaggagtcacttcctggctgcaggtattgaggccagaaggatgccagccctgggtaatgcccaagtgccagtctccctccttcctccttggcccccacacccctctttctgagagcggaggtcttgcacttgaacttgggaatgtgtcattccccaagacccccacacagggccaccaggaccttgccctccttctccagaccccaaagctggtttctcctccctcttccttgctgtgcccatccttcttcctctcccagggtccccacatctcccagatcttccaaagccccgaactgctccgtagaatcaggtgttcagtttttctcctccactgaaatcaggcagccatcagctactcctgcactgaaggtggcgtttggggcaaggtgagagacctgccaggggaggcagtgggcagtgcgctgcactgtggtcagcagctgcgggaacggggattcctgagcaaagggctggcaccttgcagtcctcagccagacccccaggcccacctgcccctcgaccgaggccagactccctgcagggctgtggcccacactcccttccccggggcccggccaggatcctttctgcttgtccatggcaggctgggactcacccaaggctgtgtgtccaggaggccactgagcctcctgatgtccaccgaggagtccatgtgaccagtgacaggcacagccccaagcatgggccacaaacacatcaccagggcagcaggagggagccggaggccagcgcatcacatttttaaaaagaacgttctggccctaggactggctcccctgtctggaggcttttccactcgcctctctgttctcggtctcctgcccttctctctaccactcccagcctccttcctgaagcaaagggagggccccagggtgaagagtgaagtcccttgccttgcctcagtctccctttttgtgaaataaacaatcctatgacccagaatgaataaagggctttgaatatacccatttcctagtctctggatttgaatcctcccaacctaggattcctctgctagagagaaggcctgactcggctccccaaaacctccccccaacccagctctgcctcaagcctcccgctacctccattccagctcccttcgtcccagcttcccccctgcagctccccaggccccagttctgcccctaccccacctcccccagccccaccttccccacccagctccaacctgccctgccccacaagctccccctccccaactctctccccctcccaccccagccctacctccctgccccgcccatccctactttgccttccccgcctgatgaagcctccccttctgccatccctcagctgtggcctggcatggagatgtaattactgcattagcccagtggcctgaagaaagactggggttgggagcggggtgggctgagaactgggggagaggaaggttctttattaaatgcagatgtttttaaatcactgtaattaactgggatggataccacgaatcacaggcataaaagctaaatgggcttttgttttaactgtttgtcatatatttaaaagggtcatcagagaatatagtacatggagaggttcttgctctcttcctgcttgcttttgcctggcaaaggctttcttcggacacgttggtgaacacgcacgtgcccatgcacacacacgcctccatccatcccctcctctctttctgagtctctctcacatccacacacatccacactgcacacacaccctccgttctctcacacacacactcagtggggctggcctggataggtcttggctgcaaaggagtgggtatccaccaaggcagctgtggaagaatcaagttccccgccttgggaagtttcctcggaggcccgggggacgtccttccccagcggcttcaggaagcaccggcggcttctcagcggacacacgcacagacccaagctcagatacaagaggcatatccgcggagacttgctgccccaactccttccttgtttcactaaacaagctagagatagacacacctccctgtgggccagactccccgcttctccccgggaatgtggaatgtggagccactgttctacttgggcaagcactgtttttcccaggtcaaaggcagcagggaagaggcgggtccaggccctgaggggtgggctgggtgctgagaggctttgaagggcccctctggccaaacacttccacctgcacctcttctggggcctgtccccaaaatacttgagcgaagacagggcctgcagcccatgcacggcacgtggcagagagaaagtgaatcgcacaagcagtgtgcattgaaggtcacaaaagagcataccttgacacagccttgtgcactagtattttctattctatttttcttttcttttctttccttttttttttttttaagacagagtctcactctgttgcccaggctggagtgcaacggcacgatctcagctcaccgcaacctctgcctcccaggttcaagcgattctccctgcctcagcctcccgagtagctgggattacaggcgcccgccaccacacccagctaaggtttgcatttttagtaaagacagggttttgccttgttggacaggctggtctcgaactcctgacctcaggtgatctgcccacatcagtctcccaaagtgctgggattacaggcgtgagccaccgtgcccggcctaggttttatatatatatatatatatatatatatatatatatatatatttttttttttttttttttttttttttttttgagacagagttttgctctgtcacccaggctggagtgcagtggcatgatcatgggtcaatatagcctcaacctctcagcctcaagtgatcctcccacctcagcctcccaagtagctgggacaccaagcacacatcaccacgtctagctaattttttaatgtttttgtagatacagggtctcactgtgttgctcaggttggtcttgaacttccgggctcaagtgatcctccacctcagcctcccaaagggctgagattacaggtgtgagccaccgaacctggccaacattatcttttctatactattctaattctagttttcacaacccacaacccggattttgaaacctggtgggtgtccttcagcagtttgaaaaacacagctcctgctcttctgtgacgcaggcttcagaaagctctctaggcccaggtgccagctctgctctcagaaacattccaggactggtcgggccaggtggctcacgcctgtaatcccagcactttgggaggccaaggggggcagatcacctaaggtcaggagtttgagaccagcctggccaacatggtaaaaccctgcctctactaaaaatacaaacattcgccaggcgtgatggcgggcacctgtaatcccatctactcgggaggctgaggcaggagaatcacttgaacccagggggcggaggttgcagtgagctgggatcacgccactgcactccagcctgtgcaacaagagctccagcctgagcgacaagagcaagactgtctcaaaaaaaaaaaaaaaaaaaaaaaaaagaagaagaagaagaaaagaaaaagaaaccttccagggctggttttatccttcctttctcaccacccaaaacacacatggaagagagtatcttaccttagctttgacctgccacgccatcctttcttctggtctcctctcctgctcaccttctgtcctggcaccactaagtccatctccttcctcgcagtttccttccagtttttgaaactcttgaaaagcctcgttagaacatgacctgagtctccaccactttgagagctcacaggaaagaaatccaacttctttcaatatgaagaatccagctgcatgtctgaagctcaacttgacattcaactgtcctacttctagccagcaaagacatactctcaacttgtagaaagggtttttcaggaaagagaggagctgagtgcttattgagcagttactatacacccagcactctccttggagttctagtggacattatctttttcactgctctcgagaaccttatgaaagccagggcatagtggctcatgcctatgatctcagcactttgggaggccaaggccagaggattgcttgagcccaggagttcaagaccaggctgggcaacatactgagacttcctatctctacaaaaaattttaaaaattagctgggcgtggtggcacacgcctgtggccccagctacaggggaggctgaggcaggaggatcacttgagcccaggagtctgaggctgcagtaagctatgatcatgccactgcacttcagcctaggcgacaaaatgcgaccctgtctcaaaggaaaaaaaaaaacacaaaactttacaaaacaggaccttattacgactcagaaaagggaagtgagttacctaaggcttaggggcatctatggcatggagttgggtggagagtgaggagaattacgccttggcctgagcataacaaagtcaagttttttctgttagggagaatgcttccctggggggtgatcagatggcagaacaggtcttcaggcaaacagggattgttttgctaaatgaacgtgaaccagtctttcccaaagcttcccacacatccctcccacccagctgtaaatttccaagctgaagccaactgttcttagtgtaccctagaaccaaacatgggaagggtggagaggaaggaaaggaagaagcggtgcagggaagaaagcagagaagtggtgagaaagagaaaaagagtaagacagaggcaaaaatagacaaagaaaaaacagtcataccttttaatacattttctccatttgaaaataaacatttttggctgggtgtggtggctcacgcctgtaatcccagcacttagggaggccaaaatgggtggatctcttgaggccaggagttcaagaccagcctggccaacatggtgaaaccccgtctgtactaaaaatacaaaaattagccgggcgtggtggtgcatgcctgtaatcccagctgcttgggaggctgaggcacgagaattgcttgaacttaggaggcggaggttgcagtgagtctagatcacaccattgcactccagcctgggtgacaaagagagactctgactcaagaaaaaaaaaaagaaacattttttcactttctaactttccagaaattgaagtgcatcttataataaacgtggaaagaaacttgtcagctaatgatacatcttacaacagggcgaattggaatggagggaaaaacagtagttgaagatcatccctgtggctcccaagatgaaagttactggggtggcctgaacttcccagtgtggctcgaaggtgtgtgtggatttttcttgtttgctatacgaaggtttcaacataatctggtgaccatacttttaaccacactgatttatggggaaagatgctctggggccacaattctatttctatttgcacagccttatgtattgattttcagacgtatgctctcagcagaaaaaaaaatattttttttgcagtagcaattaacctaataaaccaccttttcatcgttctgcatgtagattaaccacttcagagaataccagatcaacaccgtgttttgcatgcctgcaccttcggagaggaagctgttatttcagaagccaggcagaacaaagggagtcatctggtgcgatcctagtaattagagagaagaggcccctcaggtgactgctgagaaagctcccttaatttgaccctgtttcacacagtccaattttcaataaaaagagacacttcagcactgtcctttaggaaatcgcctgggagtccataatccctcagtcttcctgggggttattctgtctaaagtcctcccttccgatctgtttgcgtcaaaccagccatccctcttcccgcttcggtatttacccagggacgtttccagggcccaggcctccgtgcccggtggcaatgttgacaaaaaacagtcaaactctgtaaaatatttgaagagatttattctgagccaaatatgagtgacgatggcccgtgacacagccctcaggaggtcctgagaacatttgcccatggtggtcagggtgcagcttggttttatacacttaggaaggcatgagacatcaatcaaatacatttaagaaatacattggtttggttcagaaaggtgggacaactcaaagtggggcagggcgggggagggggaggtggtggggggtggggccgagggggttcaggcgatcggtaaatgtaaacattttccggttgacaattggttgagtttatctgaagacctggggtaaaggaaatgctcaggttaagataaaggattgtggagaccaagttttattgtgcagaggaatgtctcagcagactttagagagagagcaggttgtaaaatgtttcttatcaggctagttgattatctcctggatctggaaaggagagaaggaaacaaaggggaaacgagattctctataggatgtggatttttcccacaagagactttgcagggcaattttaaggtatggcaaggaaatatattttggggtaaaacattttgattttcttccttgttatgccacagtcagattggaaagtaagtcacaatatacagggtcaaataaaacccatctgatgagaatttatggtttgtagggcatgactccccagaccccttagataggaatttgggcaagataaaaaaaaaaaatcagagtttagtcctcagcaattatcagccaagtgtggaggcttctttctcctttggttggcaccacccttatcattagcactgatgatttgcttgagcttgcttctctttctcaccgtcagtgggaatccaaagcagtatctgatggtttgtttattatttccttcaatgaaatacatttgattgtagaagtagaaaaagtagaaagtagaagaagtagaaaaaaatatatatgccagctcctcaccccaaactcccctcccctgcccaactccgatatactcaggatatatgctttgaatctgaaacagcccaaatgcactggcatgttttctctccaggtactttgggttccaggtttgttttttgtccccagatttccctctttgacgtttcacctcctggtagcccagaacagcaagagcggctgcgtcaaatgcaatcttccttctggcagaattctcttccaatggaccataaaatgttccaccccggtccccaggaagcctgggcatttctggatagccacgatcctgccttcagtgcgtcctccttcccacgtgccagcatttcccacacagacctctgcaggcacacggtcctgggtaccaagaagcacatcaaggattcagggcctagctgcccacagctctgacacatgctgcaccaggacaggatggctcttcaggtgagcaggtgggcggagttcactctggcccacctgcccatccacggcctggtcctgcctgccatgccggcctcacctgagttgctccttacttcacaccgaatcccctgcgtgcaccgagaggctcacagcttcctgcctttgacccactccgctcgtgcaaggcttagctcaggtatctcttcctccaggaaacctcccagggtccacgctcagctcctggtccccctggagaccccagtacccaccccacactcatcggaagttacctgcttgtctatctgtgcccctgacaagacagaaggctctccaaaggtagtgtattggaaaagactccttcagctacaaatgacataaacccaacccaatgggattaagcacaagaaaaatgtgctggcttcagaggctgaaggttgggctggcttccgatggggcttgatgctggggctccagccacatcctcaggacttgtttctgtcgcctctttgcttagcttcatcagcgtcattcccaggcaggtgctctcagcttcatatacagtagggaaccagcctggccaacatggcgaaaccctgtctccactaaaaatgtaaaaattagccgggcatggtggcacacacctgtagccccagctactcgggaggctgaggcaagagaatcacttgaacccgggaggtggaggttgcagtgagccaagattgcaccactgtactccagcctgggcaacagagcgacactctctcaaaaaaaaaaaaaaaaaagaaccaacgacaacaacaacaaaaacatatacggtagggaagggaagagagtctagtttcttcatagttcaactaaaataatagaagagagtcttgttgggcctgggtggcttggcttgcatcagataactatctcaaaaccaagcctgtggctgggaggatgcaatgggttaattgaatccaggagttcactggaaccatataataataataataataataataataataataataatagctaattattagtcatctaaagtagagagtgggtccttaaacaaaacttgaggtaactattatcataagaaggtgcagtagaactgagccacaaaatcaccaaagccagctgctggaggcacttcgcttaactatcttgtcggggcgcaggcctagggtgctgatgcaggcttcacacccaatgcactcttgctgacttgagctgaaaggagggaagcagcaaggcagccactgaggcaaattcctgggagccctctgacacccatgcagcatgccaggcagctgtagacttctacgccctttcataacctcaggtaactcatcctcctgtgtgtctagagaaagctttgctgaaagccccaactgcccagcagtcagggacacatgtcactccctgaagaggaaacaagggagatgctgcaggaggcagctggtccccgttcccggccccccaactccctgggaacaacttccttgaaggccacctggattttctgagtgagttattaaatcttaagctggaacgaagaagatactccaatactgttattagccactttcatcaactctaccaactactaattaaaatgcctgctgttaaagtttatactttactaaatgaaaaccaggatgcagcatatcagctatactgtaaaagtaatacttgcttggtatggaatatattgagaatataaaaaattatggcaggggacggtggctcacgcctgtaatcccagcacttggggaggccgaggcagatggatcacttgagttcaggaattcgagatcagcctgggcaacatagtgaaactctgtctctacaaaaaatacaaaaattagctgggtgtggtggcacacgcctgtggtaccagctcctcaggaggctgaagtgggaggatcacctgagcctgcgatgctgagactgcagtaagcagtgatggagccactgcactccaggctgggcgacagagggagactctgattcaaaaaaaaaaaaaaagaaaaagaaaagaaaaataaagaaattatgaaaaatatgcacccataaaaaggaaaaagatcatgtcctttgcagggtcatggatggagttagaagccattatcctcagcaaactaacgcaggaatagaaaaccaaacactgcatgttctcacttataagtgggagctgaacaatgtgaacatgaagacacagggaggggaacaacacacatggtctgggtggggggggcaggatggaaggagagcatcaggaaaaatagctaacacatgctgggctgaatacctagctgatgggttgataggggcagcaactcacacgtttacgtgtgtaacaaacctgcacatcctgcacatgtacctcgaactaaaaattagaaaataaaaagaaattgtaaaaagtaaaaacagttaccaataatctcaccatccaaaaacaacaactaataacattttggggggtacttttcttcttccagtctttttcttttctttctttctttttttttttttttttgagacaaagtcttgctctgtcgcccaggctggagtgtagcggtgccatctcaactcactgaaacctccgcctcacaggttcaagcaattcttctgcctcagcatcccgagtagctgggattacaggcgcccaccaccacgcctggctaatttttgtatttttagtagatacggaatttcaccatgttggccacgctggtctcaaactcctgaccttgtgatccacccacctcagccacccgaagtgctgtgattacaggtgtgagccactgcgcccggcccttccagtctttttctagatgtagatgatgcagatttttggtagcagtggtcatattatctgtatgtttgatgtctcgctttttcctctctgaatgctttacttttatcagttaacttacagcttttgtaaacatgtaatagctgtgtaatagtacattgagatgatatatattaatctatttaagcactttataataggctgcttttaaatatgtgctattatacaaatgcaacccgaagtattttaaaagtttgaattgggcataagatgtattttgaagtggatgacaaatctgacctcagacaaccatcactgtgatcttgatttccagagacttcctgagtctagcttctctcgcctctccttcgaactgtgagaaatagaggacatttcgcctggcattctgaatgcctccagcttcaactagggactcgtacggggctctctggtgacgaattcatcacggggatgtgactgccctcctaaaattctcttcggggaacaattctctgaggtttcatgtggtgcctaattgacaactttctgtaatgggctgggatgataactctttctttaagccacagatgatgattaatggagttccaataggacaaggtcctcactttattctcaccttcattattttaatctctctctaaatgattggctaatggatctggattgctataaggttctgcgaatggtggatgggtgtctataaatccctcaaaatcactagaggtccccaccacttgattaagggggtcgcctcacccccaggctcaggagggggagtataactggcagaagtatgcattagacatgactctggagtggccagatgacttcggcctccccgaatggctgaatggtgccatcaaattatatttgctccttgtgggtagggataaagagcaaagggtgaaatggcaacttggaggccatcaagaatgcagagggtggtgaggaatcattcattaaggtgtcactcagtgcatccagtcacttagcaatactctgagccagctggtctgtgccaagcacggtgcaggcatcgggaaatcaacatcaccggaatggtcccgggtctcacagcctcattgtgggaggaaacagctacgatctggcaataaccctagtgataaaactgctgttaaagacatgtaaactaacagggccaacttgcagggccgacttcatgtgtgggtgtgtgacctgtgtcatgccacagggcccgcaggtagagagacctcttgcttggtttaacgttctgctggtgggttttattacctgtgatagttgatagcggatgtcaacttgattggattgaaggatgcctagatggctggtaatgtattgtttctgggtgtgtctaagagggtgttgccagaggagattggcattgctcctcctgcccttggacctcaaaccaaagtccaaaggttcttcggcctttggactctgggacttacaccagtggtttgccgggggctctcaggcctttggccgcagactgaaggctgcactgtcggtttccccgcttttgaggcttttggactgggactaagccactactggctgctttcttccctagcttgcagatggtctatcatgggacttttcaccttgtgatcatgtgagccaattctccctaataaactcctcccccactttttttttttttgagacagagtctccctctgttgctcaggctagagtgcagtggcacgatcttgccttaccacaacctccgcctctcaggttcaagcaattctcccacctcagtctcctgagtagctgagactataggtgtgtaccaccacgcccagctaattttttgtatttagtagagacggggtttcaccatgttggccaggctggtctcaaactcctgacctcaggtgatccacccacctccgcctcccaaagtgctgggattaaaggcatgagctaccatgcctggccccattcgtctatctctctatctacgtatctatctgcctgtctatctgtctacctacctacctgcttgcctatctatctgtctatctacctctatctctacctctctctatcttctattgattctgcttctctgcggaaccctgatggatacagcagtgtataaggcacgctctgccatcctccctgctccctacctgggccagctgtcagagtcaggatgcaaggggatggggctactgagcctgggatgcatctgaagactcttctcctccaagttcccaccacaagtagccgtgggagctggccctacttgtgcccatgggctggctgcaggtaccttctcatttgcctctttcaaggaccccgtggtgtaaaagccctgcacactgcatctcaccaaagtctgccgctgggacattagtgcagaaagagaggtctgctttctttctgactgctattgtatttggtttgagttggaccccaggatggaggcacttggtggcagttaatgcccttaaatcaagcccagtaaaacctttcatgctgctaatcactgcactgtgtgacactctgcacccagcagtctccagtgctcacagaatctctacaaagggactgtggcctgccgagtggtggggggtggttgctgcagccattgggatgatgtctaacaaggtcttttagtgatgagcacaggattctccaaagagatttttgctgaaatgtcaggctctgacacttttttttttttttttgtacattgaaacacgtgtcattgctgcagaactgtgttgtcttctgggaacaaacacagaggcccattgtttatgctgccaattaggaaccgtgtttggccccgacacacaaaggcccagttgtgttcagacggcggagggaagtgtcttggatctttcgacacaggtctttgggcagaggagcctaggctagtcacttacagggttccagggagccattttctcctgcttggctgagctggcgatctggctgggacctgggagagtgcaggttgctagggatgccactggctcccatgacatccctccgctgacggctctcctgctgggctttccaggggctgccaccctggggtgtgctgtccttgaggtcatgcagatctcctcctgcagagctggaggaggaagttgggcttggaagaagcagcaggtaaactgagcctgtcaaaggcttcctggctgggcagggaaatgtttgcatgctccccatcaacaggaatccattgcctccataggctggtcacagaggcaacacagaccttcatgagtaatgcaatcagtgtccctgtgccccagaaagaagctctgcccagtggcagaggccccccaaatacaacatcaaaaccgctttagtttgacttctcttaagaaagctagcccactaacttggcctgttttaaaagtaaagattagtagaaataagatttcccccccgccaccaaaaaaaaaatgcaacagttgctacaacctgctcttcaggggcaaatttcaattgttaagtgggtgaaggcacttcactgaaagggaggcaaattttctttctttctttttatttttgagaaagagtctcactctgtcatccaggctggagtgcagtggtatgatcacggctcactgcaacctctgcctcctgggttcaagcgattctcctgcctcagcctcccatgtagctgggattacaggcgccagctaccacgcctggctaatttttgtatttttagtagagacaaggttttgtcatgttggccaggctggcctcgaactcctgacctcaggtgatctgcccgcactggcctcccagagtgctgcgattacagttgtgagccaccgcgcccagcctgaggaggcaaattttctaaacacactgtggcaaaacaatgctgagctcttcaatgcaccatttccatcgctgtccctggcatcactaaaccacatccacactcccagttccatcagagaggaggacttggatccggcatcctggatctaatgtctagtagaagtttccttaagtaaattatggcaaattcatttgataaaacaatatgccggctatgaaaatgattgctataaagcgcttactaaatagcatggaagattataacgggaaaaagtttcttgctcctagactaaacgtgtttctcttttcctcacagagtaattcaaaacatcttgtaaaaccatgagcacatctatagatttttaaaaattatgctacgatatgagtctggaaggaaacatttttaaatgttaacataagcttctttgaggggcaatgtaatatttttcttactatccttctatattttctacattgtttcatagcgagtgtgtgtattattttatagttggaaagaatagaataaacaaacaagcggtggctgagatgacaggatagggcaggaattcattttctagcctctccctcgttccagtggctggctatgcccctggtctgacaactggcagctggagaccctgcccaggttatgagaggtgaacacccaggacctcttggccaactccaggttataccagatgtcaagtttagaggtttggcaacctctgaatttcactagtttgggtttggagttttcccccgacttctggctagggaggtacacacacgcacacacacacacacacacacacacgaatctacacatctacacatctcaacacgagaggcgccctgtaggaacaggccatgtggcaccttgcacagtccccttgaaggaagctggactccttggtagatgctgtaatctcaaatctccaagggacactggccctggaagcctagctgctgatgagacaggttttggtgataatcccccgagtcatgctttccaaaacaaagtctttgttccaggggcgactgtgagcatcagtacaaggcacctcccaggagattcttcctgttagtccaagggcagaacctgtctccaggtggaagggagcacactcaggtcccaggagattggcaacactgtgactggctccaggtaaagctgccctcattcccagtgcatcaactgactgacatctggggcttgggcagctgcattaagccagtgaatttctctccttggccctgctcctcagattactcaacctgttgcttttaacaagaattgcagctgagtgtctgagattagactcgttcccaaatgaccaacaaaaagaatctgcttccattgcccaaaccggctccttcacccttgtgtatacagaaccctgagcctggagcgctggcccctcccttgttcccctgatacacaccctcctcttcagttctagtaccatcttcatggcacctcccctgacatccacacgcagagggaacccagtaatgtctggtacagaaagtcacgcattctaaattagtacaacatctatggaaaacagtaaggagagttctcgaggaattaaagtagatctaccattcaatccagcaatcccactactgggtatctacccaaaggatcagaagtcattatatgaaaaagacacacgcacatgcatgtttacagcagcacgatttgcaattgcaaagctatgggaccaatataagtgcccactgagcatcgagtagataaagaaaatacaccatggaaaagtactcagtcataaaaaggaacaaaatcatgtcctttgcagcaacttggatgcagctggaggccactatttttttttttttttttttttgagatggagtctcgctctgtctcccaggctagagtgcagtggcgcgatctcggctcactgaaagctccgcctcccgggttcacgccattctcctgcctcagcctcccaagtagctgggactacaggtgcccgccaccatgcccggctaattttttgtatttttagtagagatggggtttcgccgtgttagccaggatggtctcgatctcctgacctcgtgatctgcccgccttggcctcccgaagtgctgggattacaggtgtgagccaccaagccttgcctggaggccgctattctaagtgaagtaactcaggaatggaaaaccaaatgccatatgttctcacttagaagtgggagctaagccgtgaggatgcaaagacatacagagtgataaaataggctgtgggatcttggagttggggaggttgggtacagtgcacactgccccagtgacaggtgcactaaatctcagaatccaccactatagaattcatccatgtcgccaaaaactacctgtaccccaaaaactagggaaataaaaaataataatacaaaaagaaagtcatacattcacccagtaagtatttactgaaggcctgttacacgccgcacactgggggatgcgacagtgagccaactgatacagtctgctcaggccaaatcagctgggcacttaataaagcggccaaaaggaaatgactggggacccagccccactgtcggagcacggcaggcagctgagccaaacgtcacaacatctgggataacagagtgcggaaatatcttggttgagactgggttgaggagcccttgggttgacttgaatcacaggctgaagtggtgtgagatttgtttaaccaaacattcctaaaggcaaactatcatctgactgttcaccaactcccctcagccctcctaatcctgctcttgaaactgtcactcacctgggctcctatgtggagccactttgacaccccaagtctcctgcccttcagttagcagccaagttcgtgtctctctctaaaatggctccagctctctcatcatggccaataccctatttatctccacattaccaacagctgtcatcccttccttcaacaaacatttatttatttatttatttttattttttgagacggagtctcactctgtcaccaggctggagtgcagtggcgcaatctcggctcactgcaagctccgcctcccgggttcacgccattctcctgcctcagcctcctgagtagctgggactacaggcgcccgccaccacgcccagctaatttttttttgtctttttagtagagacggggtttcaccatgttagccaggatggtctcgatcccctgacctcacgatccgcctgcctcggcctcccaaagtgctgggattacaggcatgagccaccgcgcctggcctcaacaaacatttattaaacacctaacatgtgccagccactatgccagtgctaagacacagtaacaaccaaaagggcaagtgcagaacccactgtgcagtggtagagacgggcattaactagggctcccgtgtaaatggagatgagaaagttgatagaataaacgcatggatgaatgaatgaatggcccgttgtttgtactgtcacatgacccctgctctcatccaccctacagatgctgctgggatagccatcccctactacagctttgctcttgccacttcctgccttaaaccttcagtggctccctacaacacactagattaagttctaattccctagcctggtggctctccatgctctggttccaaaccccctttctagttttgtttccttctaaccttctagggatgacctacatactaatctaactattgctgtatctgtttgatttgcctgtccagaaaatgtactcccaattctgatgttgaaatcttacccatctgagggaagggaagtatataggatgatgggaggtggtgtacaagagtcacatcctcattctctagagtaggaagtcatgatgttaaaacaggaaaatcaagaaggaagagggtgagcatattatttagaaacattaaggtaaatggcggaagaaacaaaaaaggatttgaaagtagttgactccaggggtagaaattcagagtgaggaggcttgcagggcataagactgggttttgttgtcgttgttgttgttgttgttgttgttttgcttgttttatttcaaaattagtaatatgtagttgtcttttaaaactatatacatgggcgcggtggctcacgcctgtaatcccagtactttgggaggcagaggcaggtggattgcttgaggccaggagttcaagaccagcctggccaacatggtgaaatcccatctctactaaaaatacaaaaaaaaaaaaaaaaaaatagctggttatggtggtgcacactctaatcccagctactcaggaggctgaggcaggagaatcacttgaacccgggaggcagaggttgcagtgagccaagatcgtaccactgcactccagcctgggaaacagagtaagactctgtctccaaataataataataatgataaaataaaactatatatacgaattactttgcattttaaaactgtttttaaggtcgggcgtggtggctcatgtctgtaatcccaacactttgggaggctgaggcgggaggatcacttgagcctaagagttggagacaagcctgggcaacaaaatgagacccccatctctacaaaaagtcaaaaaattaactgggtgtgatggcacacacctgtagtcctagctacttgggagactgaggcaggtggatcacctgagcctgggaggtcaacactgcagtgagctatgatcacgctactgcactccagcctgggtaatagagtgagactccatcccaaaaaaccaaactgtttttaatgcatacaatatagcaagagaaatatttaaataagaactaaaaatattaaaagaggtaatgtgtataaagtgcatagctaatgtctggcttgtaataagcaaagaaaaataaggttatcattacttttgtcttttctataaattctgttgtatgctaggcttcttcaggttttaccacatcacaaccccgtgacagcttcctaactcacctcttagccttcagtgtttctctccccatatcacaccatcctgcctgtccatggcatattcatcttcctaagactatttttattttgcaatccctgttgaaagactacaaaggtttcctactgtgtgttaggagagtggtagctgctataacaaacaaacccagactctcagtggacttacctaacacatgtgcacttttcactcatctggtgttcctggtttttaggagatgtttcccctcttgaagtttagggacatgggcccttttccttttgaggctcttccatctactgggtcctctgcatccaggcaggagagggcacaactgcctctcaattgcccaagaagagagagcacaactgcctcttaatggccttagcgtggacatgaatcacatcacttcggctcacattcctttgtccagaactggtcacatggccctgcccggaaaagaaggagttctgggaaatgtagtcctggctggatacagatgccccttctcagtgggaactcacactggggaagtatagtatggatttaggtggagccatctcttccacattcaccacctgcagaatcacatccaaactcttagctcagcccagtggctctctttcttagccaaactgtttggattctgcctcctaacaagagccttctgtagttaccataaccagatcttgatgtcatctctaagttctgtacatttgatgggacgcattccatccatctcaacacggtggagcttttcaagtgcaaatgccatctcctctttgaagactttctcttttttgtagccatccactgatcgaattactggaactgaatagagtttgagttagatgggaccttagttatagagtccaatcccactggtataagaaaaagggaattcacccaggaaggtgaaggaaatcccaaaaacatggcattcctagcaaaccgatgcccctaccttgccaagaatccagccagaacctgaaaagccatgacaggtcatgacgccatgagtttgaattgtttgtgatgcgaatgagcccagctgacctcatggcattcggtttcaatgtggatttgttggataggagccagcctccaaaatggccccaaggagttccacctcctggcactcacacctggtgtggtccccttccacactgtgccatggttggtctgggtggccaatggcatcaggcagaagtggtgttcttctgatattcaattaggaaggactttggcttcagccatggtgctctctctcttgcactcctcactttggcgtgagccgtgtcatgagtggccctgtggaatggtccctgtggcaagggactgaagcctccttcccacagacatgtgagtgcccccggagaagacactccagcccgggcacatctttggagattacagaccaggttgacagtttgactgcaacctcacgaaagactcactctgcaagactactcctggattccggattctcagaaacggtgtgaggcacacacgtttgttgtcttaagctgctaaatgttggaataatttgtttctcagcaacagataactaaaattccttttcattgtctactcacaatcaagcgtgcattttggtttacttgggagagggaaaaaattaaaattatataatacattaaagatttttttaaattgagttctacaaaagtctcaggaaatatctgtcataaatgtcaaatttctggtttgggcgcggtggcttccacctgtagtcccagcactttgggaggccgaggcgggtggatcacttgaggtcaggagtttgagaccagcctggtcaacatggtgaaaccctgtttctactaaaaaaaaaaaaaaaatgagccaagcataatggcgcatgcctgtagtcccagctactcgtgaggctgaggcagaagaatcgcttgaacctgggaggcggaggttgcagtgagccaagattgagccactgcactccagcctgggcaacagagagagactccgtctcaaaaattactaataaataaataaatgtcaaattgctgttatttcttctgtgtgttgtcctgagctctgaataattggtacactactaaggtaaaagaaaaagagaaagaggaaagaaaggaggaaggaagaaaatatgatggatggaaggaaggagggagggagggaaggtagatagaaatgaaaaaaaggaggggagaaaggagaggggggagggaggaaaggaaaggacaggaagagggaaggaaggaaagaaggaaccctatcgattcctttaaagccatcttggatcccatatcccttatggagcgttccctgacccaccctcacatctaatacctggatgtgatttctcctccagcacattgatattaactttcttatgacattaatccatttatctaaattcgttaatttaacaaaaatatttatggagcacccagtgccagctctgttctaagtgcctgaaatacattagtgaacaaaatgcacaaggatctcgtactggtgaagctgacaacattacgataaaccagaaacacagtaagaagcaaatgatagattatggaaagtgatgttacagaaaagagaacaaggagaatggggaggtaaaattgtgtctacctttttcacactcttgctccaaccatcagtggctctggagggaggacaggaggggtggccaggttagcttggaaaggctgcagggctttgccaatgccagatgcttgcaaatatttgctcaattaacgtaagagtgaaggagctagtcttggaatgaggagttcactcggagggcaaatccaaaagttactggctgttgacacaaagccctgcttctagtttatcaccagatctatcacccaaagtggggccagagaagcccatcggggtaacagctcacgagcaatcctttccatgagagtccgcagcctgacccaccttttctgtctccctggtacaccaggttgccagtttcacagaactggaccgaagcaaccgcagcgcccccaaaaccatctgcccagtatcacagggcccagataaatgaggctgttttcagtgcctgagaccccccgaacaggtgacatcctcatcgcaacttcatcagtcatctccggttccacacccagatgctctccacagatttccacccctgagtcttctagggatagagtcaatggaaagagagacctttgcaatgtccaaatactgaccaaggctggcctccgaaacatcgaaagtgtcactttatgattcagacccaaagacacaaagggaaatgaaacatgccttccacagtttagatatgtggtcctatatactttggaggctggaatttgctttaataataggcaaagatacaaggtgtatgtttttctattaggtttaatacaccacaaacagtaatttcacagcaatgctattaatataaaataaaacaataacttgtactcaatacctagaagcagaacttcagatctagaagaaatcttagaccactttcaacttcaccaaagaaataaagaagactgggtatatgtcctccattttccacagaccactccccaacacatgcatgcatgcacacacacaagctcacacacgtacacacacacaaacacaagcactcgcatgtacacacacaaacacttatgcacacacactcacatgtaagcacaggcgtgtgctcgtgaacacatacacgcacacatgcatgtagacttacctgcctctgcagctgtctccattgcctcttgtggtctcagagatagaagtgatcttctctctccctgcaccattgacagggtcccgcctccaccatgtgcccaaagacctttcttattccatactcaacccctttggaacaccttccccacctgggttccctcctctggctcactattctcagcacatccactgcttgagtcgctccctttacaaacaaaacaaaacactgaaccaaaaccacttccttggtctcatattgacctttagtcccattccttcctttcatagtgtgagcgtcctggggttgccataagaagtatcacacactgggtggcttaagcaacagaaacttcttctctcctatttctggaggccagaagtccaagacgaaggtgtcagcagggctggttcttctaaaggctcggagggagaacctgtcccaggcattttccctaggttctcacggcttgctggcaatctttggcgttccttggcttatagaagcatcaccccgatctctgccttcatcctcacatgggctcctccctgtgtgtgcatctctgtgtccaaatgtcccctttttagaaaggacacagtcgtactggattaggagccatgctaatgactttgctttgacttaactctgtctgcaaagactattcccaaataacgtcactttctgaggtgtggggagtgaggacttcaacatatctttttgggggacacatttcaacccattacaatggctcaacttaaaagcatggttcctcctcactgtcagtctctgtctccagccttcctctcaccttgcaacctgctgccggcccctgctctgtcttcctgaggacaaaatgacctcgaggctgcctgattccatcggtgtgctcctgttcttaccgcatggatactgttggccacctgctcctttctcgaacccattccccttgtggcccctctagttccatggggcatccggtgggattcagcatctctggctgtcccttctcagcctcctttagggttttcttctcttcttggtgctcctcaggctcagcactcagccttctcaccatccctcctcatccctatcccccgagctcatcatctatgatcctgcctccaacttccagccctgtgcagactgtccccaggagacttatccagcccagacaccccacgtctgaccatcaccacttgacgtgccccaggtgcctgcaactccaaatgtaccaaaccaggctcaccccttcttcctcagggtcccacccaaagactcgagctcagcctactcctccttccacagtcccttcctcaccatccatcctttctcactgagaaagacaacgaggcaacatcttttaccattttcttaccctccagatatgtcagaccccaagtcccccagagctgaatttaaagttatctttcaagcaggtcttctccgtttaacctctattgctactctaggggattccataagttctagtttcctggctgcagaactgtgcaggccgcctaccccctgccatcacctcctccctggcccttcctcttccaggtcatctgctacaatgtttccagagagctctctttaacagtcaagtgtaataatgtctggaatcatccaagagctccacattgccttaaggataaagtaccaactctttaaggtcacatgaaatgctccttgtattcataatctggccttgggtgtggtggctcacaattgtactcctagcactttgggaagccaaggcgggcggattgcctgagctcaggagtttgagatgagcctgggcaacatggtgaaaccccatctctactaaaatacaaaaaattagacgggcgtggtggtgcgcacctgtagccccagctacttgggaggctgagttaggagaattgcttgaacccgggaggcagaggttgcagtgagccaagattgtgccattgcactccagcctgagtgacagagcacgactccatctccaaaaaacaaagataataataataatctggcctctgctcatctctcccatctcctcttacctgggctgttgcagccccactaatgtcttccagccccctgaaagtgctgcgctgcaagctctcttgggtttcctttacactgacctttccctctttcttcagtgcccttccatcagcttctgacctattactgctttcccttgcatctttcaagactcagatctgaggcccttggagaagtcttcctgagcccttcagaatgacctgagtctcttctgtctcctgcagcacctccatgcattgtaatcatagctcaagcacggcttgcagctttaaatccctggcacctagttcgctgcctggcacgtaatacacggcaattcagcaagtatctctaactcagtgaggagtacaaaggagaagtcagaggcccagaaacttgcctaaggtcaaacaattagtgagcagtggagttgagactcacccttacttttattgtaaggttctagtctctattccaatattattatcagcatagtgggaggacaaaggcatcagaatcacttggggagctgattagacatgcagatacatgggcctcatctggacctaaggtgaatttgtaattcaaacaagctaccctggcgattctcatcaacagaaagtttgagaaccgacgccctgtgccttgctgcttgtctgaaaggcctctgtaaatttatcacatttttctaagtcagttcagttgctatctatcggtgacaagcagggagagctgagcccggctttcttacattttcattgaaaagcaatcatttgttggagtcctgaaggttttccctttaagagtccatcattaggatgcaaattatacgtgtaaaatcaacagaaataggaggatggagtaattcaggcaccagtgtgtggtaggaagtgactgggcatggagaggggtattatacgcaaatacagccctcaaaaaggtgtctttattactctcctccaattttcatcgcctcagaatcatctggagggctggctaagatggagatacctgggccccatccccagaggtttcgattcactgggtctggcaatggggtctgagaagttgcccttctaacaagctcctaggtaaagccaatgccgctggtctgggggaacacactttgggaaaccctgagctagtcaacacagtaatctgttttgcaatagtcatggagatagggacgtgatcatcctgtctttccacttaaacccctgcacagatgtggatcttgctacctttctaaatggagtttctttttcttcccatagcttgttggagtacaggtggtatttggttacatgagtaagttctttagcggtgatttgtgagattttggtgcacacatcacctgagcagtatatactgcaccctacgaaatggagtttctattaataactccatttgatagaaactccattttgtagggtgcagtgtatatttgaactaatttgcctaatatctaccacccactgatctcaggttggcttctcaggatttcaaagaatatatctgtacctatttgcatacaggagtttcaaaaatatctgaaaagagccatcctggcctgcttgtctcttcttccctgcaccaatctcttctgcttcttcagctgttggtcagactggaggatttccatcaacaactggctgtattctgagtcagtctctaactttgtcgatttctttcttgcaccctggtgctcagaactggccaaaacactccatttgggatctgaccagctcagagtgcaatctcttaaactggacactattttaacgtagtgttgttgtcgtcttcaagcagttcacacatttagccttgttgaacgtgtggtcatctataactagaattttttacattaccttgtatccagctaagtcttcttcatttgtcctcaactagttgacattttaatttaagagacacatttaacatttagtcctcttaaacgtaattttgttggttttaccctttttttttttgagacagaatctagctctgtcatccagactggagtgcattggcgccttctctgctcactgcaacctctgcctcccaggttcaagggattctcctgcctcaacctcccaggtagctgagactacaggcgcccgccaccatgcctggctaattttttgtatttttagtagagatgtcaccatgttagccagcatggtctccatctcctgacctcctgatccgtctgccttggcctcccaaagtgctgggattacaggcgtgagccaccatgcccagccctatagatgatcaacttataccttagttataaggtggtggtggcagggctgataacaggatgaccaacccgaaacatgaacgtacccatttttacagttgtgcctggggttcctactcatactttatcagttcaaacaaccactaataagtgacactgctctgcagtcttaacattcatggccaccatatgcctcaatgtttctgggtcaactttagtttcaaacattatctctactgtcacaggtccacatgccaaactatgagtccagtttggggttcagaacatatagtctctatagttctgccttttctcggtgctcagagtctaatatcattggagaagaggacgatttttgcctgattaaactgagggagggggataagaaagggaaccaaagacaatgctaaataatgtattttggttcaattttccaaaaagtgaagctctgcttatcacaatgattggtccactctggtccacccagatacctggattcctcatttatgtagcagcagtctacttcgtgggcgctgcctattttgaagatgttattttgcactcccttctggagcatgtgataatacctctacctttgagaaatacaaaagatgtaggttctctgcagtcgagaattaaatgaacgtaaataaaatgaatagacaaggcagaagcctccatgtcagctccctctgccttcagatccttctaagggatgtgggttctcgggaggggaaatacacaacacgatacaacagacatttgacgaccctttagaggctggttgtgaatctgactaccggagggcttaaaatatggcagtaagaagaaaggagctcatgggaccctgaagggaaacgagagcggggaatttgtctctttcatccacagtcgtttcaaagcatgacacttgcggtaacaaaattgcattgcgaaagtactagtgtgttattatctcctcttcaagacagggacacgtagacagggaatggcctcttccaataccaacttccaagtagcactgctgatcctccactgaacgatgggggaaaagctagcctgcttctgcgaccttgcatgaaaatggagaaaattcttggtttcaaaatcttctcctggcttgaaccgaaagttaaaaagggacttttcgaattgcacattgcgcctgaccttacctaccactaatgaataatggatatcgaggagccgtggaatggaggatcacggcggcgtacggagcaccggggaggaatcgtggggtgcgtaggcgccggagcgcccgggttcggcccggaccgaaggcttgcgcggtgaaggtgtggtgtctgtgctccggggaaagggctgtctccccgggggactgtttcgcagcgaggcttgttttgctcgcagctgggcgctccctggggagcgactgagcgcaagggcgggccgggaggcgcgaggcgagcacgatgctccagggccccaaggactcgtgtgcgtgtgcgtgtgcaaagtggggcggtgcagggcgtgtgcacggcacgggcgagacgcgcgccggtgcgggcgccgggcgccgccgggcgcaattacagcataaagcccgggcgccgcggggcgctggcccggagaacccaccggacgcgcagaaccggatcggcacccctcccgccagcaccctaacgcggagccacagcgcccagggaccggagggcaggcggcggcggtaaaggacaccacgcaagtctccacgtaacccccccgagcagtgcaagctcccaggactggcgcgcgtcccggccactcggagcgcgcaccgctcgcaccccggcgcgctccccgcgcggtgcagggaaccacagcgcgggcgggtattaaggggaaaggaggaggcgtggcctggccgaggagccaatgggccgggaggggcgcgcgggggaggagctcaggtgcagagtgccgattggccagttcgccctccggtatgcagatacggtgggagtcacgtgctaggggccgggacgacttcctgttggaggccaacgcggggcggggaagggggcgcgagcgccccgtctggctgaagcggggggaggggggttcttgtcagttagagcaacaagatggccgcggtggcagctccgcacctcagcgcgacggccccgggagccgtagccgccgccgccggccccgccgccgcgcagtcttgagcgccgcccgggccgccccctgacagggcagtcccagcgcccgccgcgctcccgccgccgtcaccgtcgcagtagccgcgggcccgcccgagccggaggcggagggagcggagcggccccgcgcccagccgtccgcagctgccaccgccgccgccgccgccgcctaggacccggaccccgccggagccgcatcccgccgggcgtgaggaggaggacgcgtcgcggcgttgccggggccggacctggacctgccgggacgcgccgccgcccactcgcccgcgccgccgccgcagccgccgccgccgcccgcgccgggacctgagtccgtggcgccggcgctgagcgggcccccgccgcccgcgcactcccgaggccctcgggcggttgttcgtgccgccgccgccgccaggcccgcgccaccggagccccgcggagccgccgccgccgccggggacggagcccaggtgagcgcggcagtccgcccgctcctcgccgcagccgcaactttgccgggaggttcgcgggccctttgttcggccgagccgagccggggcgggcgctggcccctagcgacccgcgtgcggcgccaggccccgggccggccgggtttgaggggagcggcgggaagcggccggggccggggcgcgtgtgtgctagtgtgagacggggctgtgcagacgcccggtgtgcatcacaatcaaacgggagtggaatggagggctgaagatggatgtgccccctcccttttaaaactcatgcagcggtgaaattcggtcctttccgggcagccccccgcagattttgcactggtgatggcaggcgcgaacccgccgtgttttggtgcaggagcccggtgccgttgtttgggggaagagaaaaacccggggcgtgctgcgggtgggcggagaaggacccctgggcgctctgcggctctgaaatcaggtggattttctaacggtgctgcggactgcggagtaatgcgtatgaggaaaacgagccgtacaacatctgtcctgttatcagataacgtaacccgagcgcctggttgccgcctctgctttaagcggtgcctcctttgcacctttaccttgaggacgagatttaattaattgattcgtagctatgaaaatgtgcagatgtggatgtgggggttccctgcctgttaacctggggaagaaataactggcaagcatgttacacggagctttggggatcttagcaaaaatgaaggcttgctgcttggatgttgtgccgggaggtaggggaggaggagccgctagatcgtggctgcacctattgcattcgaaggcatttgacggtattggtgattctgcacgtaattagtggagttgtctcaaacctttgcctccgccaaatgaaacctccatttgagtggtccgctcggttatttctaggcgtgaactgcggattctaaactcaaaatggtgctctgtagatgtccaacttcagcgtctttaaggagttgcaagttggagccttctgactgggttaatccattgtgtagccgaggttcggtttttctcgagtgtctggtgttcacgttgacgtacttcggccagtacaaggtagccaatttatggtgatcgctgtgagagcctcgtacgtccctgaatgtaatttgagcctgcataaggcctactttatgcaagtgatttcctgcagttggaattgaataactatgcgaatgagttgagaccctggaaacctggcttgagtgatttcagaggacagtggtagctggtttgaaatgtgtagggggtgttggcaatgatattcatagattccggatttccttcagtactgtatgaaagaataaatgataaaacttagccccaggccagatgaacttggttagtagagggcaccttgaagaaatttacattgttccagaacagcagaggtggcaatggtctttgagcatgtttcactgtagcacccctaggatgctttgttgggggaaataatgcaaaacagggtttttaaaatgactagttcagttgtcggaattaattttgtgtgtattaatagaacaaagtaatgatgtgaacagttgtaactttacctatactgaaagttttttttctacagaaagtttttaatatttattttcataagaatagacattcttggaagctgtttttcatacagatttctcatgacctgaccataggcatagtcaggccgtgagaaattgatagctcagaaaacggtaatagtaaacacacacacacactcgtttttattataaggatctgattttaaaagcttgtttgtaactcttctgtgcttcttgtccaaaacaaagaccttgctgaccttacctcggttttactttttttttttttttttgagacagtttcgttcttgttgcccaggctggagtgcaatggcacgatctcgggtcactgcaacctccgcctcccgggttcaagcgattctcttgcctcaccctcccgagtagcagggattacaggtgcccgccgccacgcccggctaatttttgtatttttagtagagacggggttttgccatgttggccaggctggtctcgaactcctgacttcaggtgatccgcctgtctcggcctcccaaagtgctgggattacaggcgtgagccaccacgctcggccggttttacttttaaggtatgaaattaaatacggttgatactgagactgtctgtcataaggtttaatcttaacaatttcatttcggattctgccatttaaatattctggtagtaacctggagtatatgtaagtgttggttttagattttcgtccttcgtgtttattgcggggggcgagggtgggtttcgagtagcatatgtcttaacactaacatcatttcgaaacaggtttacatttatatttagttggcttaggaactttggagtaaatagttgcctttagaatgctgattgtgaaggtagagtggaatgaactgtttcgtttgacattcggtgattaaaaaataactaagtcatacagaggatatatgaaactaaatacagtatttttcatcaccgctaccgccacctttttgttaaacagctggctttcctgagatacatttgtgcttttccaaatgctgtcatctggcttacttccaaaaccaagccagaggagggtcagggctggagtaggacaacctttctccttaatgaagggagtttccagtttggaaagaaatggaagacacagttcctgcagtgctggctgggaatgaggtatttacattacctctccaaccccaattgaaggggatgaggtcttgattgtaacttagtcttgcttggcccaggaaagtgatgctaacttgacattttttaaaaaagactactgatgaaagttaattgtttgatttgagtatatagaatatctttggcatcgtagaagttcaccaacaaccttttaagattgaaaaaccatttaaaagactatttgggggtctttttggccttccccaataggaattggagcattcgattgcatgcttatgctttggatgactgtttatctttcagtcagggtttattgtgcaaaggtgatacttaagattttataagaaagaaaatcgtttggctgtgaactctaggctgtcccgtataccaaagtaaaacacatgggacaattaagatttggggatagagcaagcaaagattaccaagagcaactgaagctggtggagaaggcacaagaaatggagaggaggagacaggaacagatttatagacgtccttggagctggcagaaggataggttgagggagcaggaggcggagtcctgaacagactgagcgtgaaagggtctatataagctgggaagaaccaggtaactttatgtttgttttgtttttgttatcttccgttgaacttgttttggcttctttctcataattttaagacatgggtttttaccttttctccagctctatctcagagggtcttcaaatattttaggtgagaagtaaggaaatattttgaagtgttggtgacacagtctttggtctctcttgcatgacaactggtcccagtgaaggtgactggattttagttactttagatagttaacatcttaatattttgtttgaagatgtcatagatttgagtagggacagcaaaatatcaggtgagaagtggctcctattttgtagggggtagattgtacaggttttcttgcttttactcagtctatggctatccaaatttatacaaatgagtttttaaataattgtgtggtcacgaggagagcattctttataaaatgatatacaataagctttctttaaatagactttaatgcagtggagtccatttataaattttcagcttatacataactttttaggaatataattacttaaaaatgtaaaggttacttgtcagaaataactatataaccttgtgcagaaagtgtatatctgaaattgaaactgagaaatgtataatcttagccagtgaacttgtttgaataacccgattaaaataatggtacagtttcctattgtacagatcgtgcatttgaaatgttaatttatttaatgaaaagtaaattatgtaattttaaaaaatctccacctgggatatatataacaaggttttacatgtttaaaacatgctgaaaatccatatcgtttgttccatttttggagttttactaaaaatgaattcttttcttagctttagatgttttcagagaatgaagaagctattgcaggaatggagagctgtttgttaagaatgcattcctcctctgtagccttcaaaagactatagagctgtgtgcagagctagacaatctgggcatccagccataaaacatcactgctgtagcacagatagttgttcgcactctcctgagccctctgtggctgcaaaccacaacagaagtaatggtcttgggaaaggaacactcaatgttattttgaactcttaatattctctgtgtctctctgagttccagctatgcattggaactttggttttctaaaatatagtagtgattaaggatgagcaataatatagcttcttaagtatattcctcttgtaagccagtggatttaaatgtttgctctaggaaataaggggtgtctaggaaataagagttgtctgtcccaccatcttcctctttatttgcctctttgttgcaatacttcttttctgttggagaaccactgccctaagacccatatgatcactgggccacacacagtgcacatggcccaaagagtcatctggaatcttccagatattttgtgggatggattggtctaatttggcccagtttccactttctcatgaacctttttggcataacaaatttttaatttttttgcacaaaaatgaagaagagtgtgactggcatctatttgtataaatccaaatggtttactctgaagaccctctctgtttttcttcttcagaccattttagaaattaatactctattgtatctttataacttccttctctgaaggattgaactacaaacctatagtatcacagtgtcaagttgaattattctcagcagttggataactcttgtctgtggttgagtcctttactaatgtgcagactgtcttttgacgtggctaataccagatgcaagttggtgcccaggtggttattgggaatatgtgctttgtttgattcattttatgtgtgccttctagcttattaagaataagatctctcacagctaaaatcaagtgcttggtttgagcctggcaaagatattgtttacttttttattcccaaagatcatttctttttaattactcttttaggaagcagggaaaatctcagtgaaaatagcaactgggaattaaactaagatctgaaactgggaaatggcaacgcgggcacaggtgtcacctttccaactgttgttgagatgatgtggacaacggttattcagaaattacagtggggaggagggagatgcacaagtattttttctcatactccatatgaaatatgaagtgcagagtgaggggcccagagtgtagggagggaatttaataggctttgttcttcagggggctatggctgatgtcttaaacaaggtcttttttggtagggaggcacagtaagggaagaaggtgatggatttgtgggaacaagtacatttgagtcactgaggacaattgggaattgtgaagtgggagtggacgaggttagaaagcatccttaggtaaccagatctccatttaaaactaatctgagcatttacaatgtgattatgtgccaaggacatgagtttatcttatttaatcctcacaacactcctgtgaagtggttgcttttaacattcccattttacagatgagcaaagggagtaatttccacaagatcctatagcttataggagatgaagccagaatttaaactcaatacacttcaaagccctcacatatggaaaaagcttggattattttaatagctgcttaatgagtctcttcctctgttctgtgtcctgctatccagctgccaatattaactgactgccttctgagcactttgtgtgtatgatctcattcatttctcctcagcagcttataagttaggagctgtgattatattcactttatacatggaagctgaaactgatggaagttgaataatttgccccaaatcagagccttaataaatgtgtctaggtccttggaagccagagcttgagctctttatcattccgctgtgctgccttctgaagcctgagcctgattacatcattccttccacaaaacctttatgtcttccctgtgcagcggccacaggggaaggacatcaacttcttcctgccctcctggagctgtcttactagtatagtgagagaaatgggcaccaaacaagttgttaaaaaaagagagaaagcaatacatgtgaagaacgccacatacacatattaaaaagttgacaaaaacctaaggtaatagatcattatatagctgtatactggatctcctctcttaaggacgcatgtcaaaattttggatgctctgagaactccagcagtgaaagaaatatgtttacctttattggcccagtatttcccaaacttatgtggccattgaacattgttttcccttcataccactttttagttcagtgggactgactttaacaaattcagaaaggaagagtgcctggtcatccccagagagggcctgtgggctgcagtggttaggcaagacttcacttgaaatgagttctgaaaggctggcaaagcttggttggatgaaagggatattctacaaggagacgaatgggcaagccatgtttggaaatattttgtaaagcgcgtaacataatggctgagacatagtagggacgggatatagttattgactggatgagtgcagaggcctagctgtaaatggaggttctgtgttggcaataaggtttagaaggggctctatcaggtggaacctctagttgttggctccttaggaaccgttggtggctgttggtgggcatgacatgaatcaggtgttggattagaatcttccttgagcagaggtatggtgttaaaactggctgttgtagctgtctgtgcaaggtgatgcctacatactggtagggtcaaactgaaaagctgttacaaagaatcagcaggataaaataatacaaaatgattgacgtgggttgttggaaagaatgagttctaagaggcatagggtacttactgctcttcctagaatctgccacagaggctttaaattaatgaagctaatattaagatatttggttaaatacacatagtacattctttttagatgctgatggggaaagatgacacacaagatagtagttttaggcgagtttattgtatgaggttgtgttctgcagtagagatttgactcacagcataaatccaagtatgtgatgagccatgtaataatagacgtctgctgttaattatggtggatactctcaatgaaatcagattttcttagggccatacccataaaaaaattcttgacctagatcttatataacagtcccaggtatatagtaaattttatgcatatggaatgttgacaggaaagaagagaaaacaaaaatctttaatgtttcaaggaagcataagatcaaatcattacataaatagaatagcagcattagtaattgtgttgaagttactagaatttttaaattttaggtaaacttaagagattccttaaacttaaggaataatagattcttttttactcctgtagagtggggaaactttaaaacagataaaaatattttttattttatcagtcaggtgatgaatgaggatcttagccactgttggacttttgtgtatatgtagtgtggcatttaattgagcattgttatttattcttttctatcaactttagactttaaatttcagcacatttccttgcagattaatgctttgcaaaaaaaacttcattatcatgataatttcttaagatttgagttacttattagcagggataataacatgttcatctttgtaatccctacatcgtctatagtattttgaagatatttagataacaatcatctgtttcttcagagatattgcttccacaagtcatgcggggggggagagaagattgataattgaacatgtttcttcggtttttaatcttttagaataacgatcaactgtgttttcaactagtaagcctggtacgtggggctgtatctgcagatttgaggggaattgggaagctgacaggtgaggaacagtcatcataggggctccctgcactactgttttctgtagggtacctgaaggagtggctagttccttttcctgaggcctctgggcactgccaataagtgccactgacccaatcatgaaaaaacaatgtgtgacgcttctcatgcacaacaaaattgtaggtatgatagatcaattacaaggtaattcctggcttgtctttcacagatttgatgatggtctttagatactagcccattggaaaaatgagtgttatgactaatgagattattctggccaagccagaatgtctggttagcattattctggatagacttatatcccgccctcctttagggaaaactctctggaaataagaggatttttaaaaagagattgtcagtattctttttcttgaaatcaatttatgtttactcataatttcagtactcctttaaaggttactttataaaaatttgagatgtagttattattcttattattcttattcttattcttattttgagacagagcctcgctctgttgcccaggctggagtgctgtggcatggtctcagctactgcaacctctgcctctcaggttcaagcgattctcctccctcagcctcctgagtaggcgggattacaggtgcctgccaccacgcccagctaattttttgtatttttagcagagatggggtttcaccatgttggccaggctggtctcaaactcctgacctcgtgattcgcccacctcggcctcccaaagcactgggattacaggcgtcagccaccgcgcctggctgagatgtagtgggttgttgttgttgtttgagacgtagtcttgttctgtcgcccagactagagtgcggtagcgtgatgtcagctcactgcaacctccgcctcccgggttcaagcgactcttctgcctcagcctcccaagtaactgggactacaggcgcccgccaccacacccagctaatttttgtatttttagtagagacagggtttcaccatgttggccaggatggtctcttatctcctgacctcaggtgatccgcccacctcggcctcccaaagtgctgggattacaggcgtgagccaccgtgcccggcccgagatgtagttatttaaatagcttatgcacatgcctatttagccttggatggcagaattttgattgggtagatcttaagtcttcagaaaatggtttgttctctttaacttgtgattttccaactaaatcttaaattagtgaacgtgagtttaaaaattcagcctttaggaacactcacaaaagttctcattagtttctcttactttttatttgtctttcccacaacctttcccccctgttttcccacttgccctcctgaaactgcacttgagagttgggagtagagagagacctggtttgaggcaacagggtgaacacagcgttctttcattctgtgtactgttgtgacgctaagcctgttagcgttgagataccagcccacagctggtgaaaggattccagacttcatactggcagtttattgagtgcctaccatgtgccaagtacagagcacttaatatgttatttcatttattctccttaataagaggagaacactgaggcactctgaagaagccaggtcacctaattccattggctgtgctcctcaccgctctattgcactacctcattcagactgactgaggtagtataatttccattatctttaataaattttttttttttgaggcagagtctcgctgtcaccaggctggagtgcagtggcgcaatctcggctcactgcaacctctgcaacctgggttcaagcgagtctcctgcctcagcctcccaagtatctgggattacaggtgcccgccaccatgcccagctaatttttgtatttttagtagagacggggtttcaccatgttggccagggtggtctcgaattcctgatctcaggtgatccacctgcctcagcctcccaaggtgctgggattacaggcgtgagtcaccacgcccggcaatttccattatctttaaaaatctgagagatctttgggacctcaaatttgatctgtggcatctgacctattaagagaaaactaacgtttatgtgtttataagaatcgttatttatacttgaaaagcctgatgttcttttctctctgatttctaactctggcatctagaatgcagtgtaggcagcagtgtgcctgggagacaagcagagatctcacggattcctttatttttcctgccatagcagcaaattttccttggagcactatttgaaaattaacattactgaaaaaattaagcccacttaaagggactctagtttttatctaaattataaaaggtgagaagacagttctgaaaaaaatgtatcaccttgaaactagaatgctttagttaatggggtaagctagaagtaagctgcctttgataactcatgtaagagcagcatatgaatggatgataactgtctttcttccatttaattcagctacttcctattcaatctcaaatctcagttggaaagcaatttccctcacttgacccatttttcttctgcattatatctttcttctggttcttcaacacaaaaagtttgaaaagacttgtaagcagattcagacacctggtttgggctaagcgtatttcattatttggctttccagttggaaggataacagttttacttctttacattttgttttgtttcttggttctttttgagacaggttctcactctgttgcccaggctggagtgcagtggtacagtcacagctcatcgcagcctcagcctctcaggctcaagcagtcctcccacttcagcttccaaagtagctgggaccacaggcatgcactatcatgcctggctaatttttaaaattgtttttgtaaagacagggtcttcctatgttgctgggattgcaagtgtgagcaacctcacctggctgctgctttactttgatatcacaactttcaggagagatatatgttaaatgactgagactggtatagagtcatatgggtatagaccaagcttgcccaacctgcagcccgggatagctttgaatgcggcccaaaacaaattaataaactttcttaaaatactatgagatttgtgtgtgtgtgtgtgtatgtgtgtgtttaagctcatcagttattaatgttagtgtattttatgtgtggcccaagacaattcttcttcttccaaggtggcccagggaagtcaaaagattggacacccctggtatagataaaagcaggtaattggcctagcctgggcgacacagcaagacccttgtcttttaaaacatgaaaaaattagctgagcatggtggcacatacctgtagtcctagctactcaggaggctgaggtgggaggatcacttgagctgtggagttcaaggttacagtgagctacgatcctgccactacactttggcatgggtgatagaccttgtctcagaaaaaaaaagaaagaaaagaaaaaagtaggtggggggtataaaattcttgttttagtaacacgggcaatgtaaagatgttataattttagtaaagatatatgaaataagcctcacatatccatattgtaaaatgtctatctgagacccaagtctctggaatttgttatctaaattaatctattagtggtatcattaacacatgcattagttacaggtgtcttgtaataacatttatttcacaccttgggtgataaagtgcttgaattggtttctgtctttgccagatcaaattctaaatttcctaaaatagctaacatgaaaccagtctcctttatgaacccttctctgacttctctcatgataaactttctcttctctattcattcctttggtcatctcattcagtcctgtgacattaaataccacatacgcactgaagacaccaacctagactgctccccagactcaatatttccatatccagttgcctgttccacatcttgatggctttttaatgggcatttccactgaacagatccagaactgcacccctgttcttgccccaaaataacctcaggaggttattttgtcttcactgatgaattctgtcaaacatagaactaatatcgagccttcacaaacatttccagagattaaaatctgctctgcttgcattccttcccactcactgaaaagcactgccatccttccagttgctccactcaaaaactttggagtccccattgacttctctctttcactccatgtatgtccatcagaaattaagtaagagatttctgaataacccataggttaaagaagagctcacaagggaaaattagaagatatttttaagtgagttaaaaaaaaaaaaaaagaacatgtcaaaattgacatgatgcaactaaactgtactaggagagaaatgtatagctttaaatgtattaaatatgtattagaaaaggagaaagatcacagatcagtcacttaagcttctaccttctgaatctagagagaacaaactaaaccgatggcaaacaaacaaaaaaaaagtagagattggagtggaaaccaaagaaatagaaacataaaaacaatagagaagatcagtaaaatcagaagctggataattgcaaagatcaacaaaattgacaaacccatagctagactgaccaagagaaaactagaggagacacaggttactaaaatcaagaatgaaagagagggccaggcgcggtggcacactcctgaaatcccatcactttgggaggccgaggtgggaggatcacctgaagtcaggagttcaagaccagcctggccaacatggtgaaaccccatctctacaaaaatacaaaaattagctgggcatgatggcaggtacctgtaatcccagctactctggaggctgaggcaggagaatcacttgaacttgggaggcagaggttgcagtgagcccagatggcgccactgcactccagcctggaagacagagcaagactctgtcttaaaaaaaaaaaaaaagaatgaaagaggggacatgactgctgattttatagcgattgaggtaggtaccataaacaactttataccaacaaaagatgatttagatgaaagtacaaattcctaggaatagacaaattaacaaaaattgatgcaggaaaaatggaaaatttgaatggacatatagcaagaaattggattagtaatttaaaatcttctcacaaagaaaatccaggttattttgtcttcactggtgaattctgtcaaacacatagaactaataccaagccttcacaaacatttccagaaattaaaagaggaaggtacatttaccagctgatccagtgagggcaatgttaccacgatgccagagccaataacatcataaataataatatcataaattatttattttttgagacagagtctcgcaactctctctcaggctggagtgcaatggcacgatctcggctcaccacaacctccgcctcccaggttcaagcgattctcctgcctcagcctcctgcgtagctgggattacaggcgcctgccatcacatccagctaaatttttgtatttttagtaaagacggggtttcactatgttggccaggctggttttgaactcctgacttcaggtgatccgcccgtcttgactcctaaagtgctgggattacaggcgtgagccactacgcctgggcaatacaccatattaatagatgaagaacaaaaccacatgatcatctcaataaatgcagaaaaagcatttgacaaaatctaacattctttcatgagaaaaactttcaacaaattaggtataaaagagagctgcttcaacttgataaaaagcacatatatgaaaaaccatacaaaacacagtaatattatacggaagagtgaatgacggaatgctttctctccaaaactgggaaaaaaagaatatcagttcaatgctattcagcactgatctagagcttctagcctatgtagtcaggtaagggaaagtaataaaaggcacctggattagaaaggaagcggtgaaaccgtccttatccacagatgacataaccctgtgtatagaaaatccttaggaatccacaagaaaggttacttgaactagtaaataagtttagtaaggtcacagcttacaagaccagtgtttgaaaatcatttgtgtttcttgatgctggcagtaaacaatctgaaaatgaaattaagaaaactcattcactataacatcaaaagcaactaaatcctggggaataaatttacaaaagaagtgaagatgtttacaccgaaactgcaaaaacattgctgagagaaattaaagaggatccaaataattggagagacattctgtgttgatggatgggaaaacacaatattgttaatctggcactctacctagattgatctgtagatttgatgcatctctatcaaaatcccagaaggcttttgttgttgttgttgttgttgtttgtaaattgacaggccaattctaaaatttatgcagaaatgcaaaaagacctggagagagggagggagggagggggaggggggagagagagagagagaaagaaagaaaaagaatggaggtaaaacagaacatgaaaagttaaaacaggctgaaggaaaatatttgcaaatcataaagctagtaagggacttgtattcagaatatataaagagctctcgtaacttaataataagacaaagtacccaattttaaaatgggcgaaggatttcaatacacatgtcaccaaaaaagatatacaaatagctgataaacagatgagatttcttgctatgtgtccattcaaattttccatttttcctgcattgattttgttaatttgtctattcctaggaatttgtactttcatctaaatcatcttttgttggcataaagttgtttatggtacctacctcaattcctgtaaaatcagcagtcatgtcccctctttcattaccacccccgccccgccccaaaaaaaaagtaagagggagagatggagtcttgctgtgttgcccaggctgcccttgaactcctgggcttgagagatcctcccaccttaacctcaagagtagctgggactgcaggcacgtgccactgcaccctacttgtgtatgtttttggttcatttcgttttgggtttatattaccattgttattcaatgttatgtgtagtcagggtgataatagattagcaacaacagtgctattaacaggtattatgtcttgtttctctgctatgtttccaagaacaaatcttaactcattgagtctgttcaaaattcacagttctgtagagttcaccgaggagaaaacagagacctaaagaggcagtgtgacttgcccaagatcaggtagtcctgggttcaaacccaggttttgcagaaaactaattccatgccttttgccataggtaaatgagcaagggaaaaaacaatttgcaaaacaaatttgtaaacaaacatctttaaaatgtatctttctagtaatcaaagaaagaaataagccagattaaaaaagaaacattcagttgagaaaacttaaatatgatactgaggaggatgagaaaagaaatttctttaagtctcatgtatggggggaaaaaaattcttccatgcatcttttgctggtggccatgaaaacaggtgtaaataccttcaggtggtgaaaataataatgtacatcaaaagaatcaaatacgttattaccttaggaggtttttttttagcatctgtattaaggtttttttctgatatacattaaactgcacatatttaaagtataacattcaataaatgttgatatacatatatatctgtgaaactacagccacagtcaagataatgagcatatccactgaggttgagtgttgaaatgtgctggtgggagggcagatgcagtgtgctggagggagaaagaagccaaattgttaaaactgggcaactggtggaaagatggtggtggagggaatggggagacctcccttataattttgcctataaaggcagctacacatagcagttttaaaaatatttgtcattcatgtaggaaggtaatcatttcttaaatatttaatcaaacatttttcttttttgggtaaaatctggtcttttgaaaatatgaaatagcattgtgattatgaggctttgggacatcatgtaagagtaaaggttcaacaacagaagtggaaactaatttacagttgccatcttttactcttgccacataagacttgaataaaaagtaccatgatatacttttatcattactttataaagtaaaggactttctcatgcaaagaagtggaaaggataccatcttataggagaatcctataaattgaataaatgcatctttatgaaaaatgtaggtcgtctttatttttctcattccatggtgttataaaactttctcaactgatcatggtctttagagtgagttgtcaactctgggctagatttctaggaatgccacttattagctaggtgactttgggtttaatttttattttctctgagcctttgtttgctcagctagaagaaatgaataataatatatactattacaggattattgtaagaattaaatgagatagtatgtaagtttctcacattgtaggctcatgttatcttccttatattcagccctgcgtagtctgtttctcactatcacacatttgctctttaattacatatttgtgtatacgtttctgtaatttcaaagaagtgagtcaaatttaaccctatcatagacatgactatagtaatcattttggtatgttttataaggtgggtgagggaggttgttttgccctgaaaacatctacaaatgctagcatataaaattgagcaaaagatgtgggatagagattgaattcatattctttgtgaagactattaggatttgttcttgtgatgatcagattgtcagttcagtttactgtatttcacacacagtagccccagttagggttccagaaatgcttataaatttgtctcctgtggtattatcttaatgtggtgttggattcttcatcgctgaagtcagctattcaggtaaaactttatttggtaagatcagatacctaagcaatatatagtcactaagtcacttcatatataaaacttggggccggatacggtggctcatgcctgtaatcccagcactttgggacgccaaggcaggtggatcacctgaggtcaggagttagagatcagcctaaccaatatggtgaaaccccatctctactaaaaatacaaaaattatctgggcgtggtggcaggtgcttataatcccagctattggggaggctgaggcaggagaattgcttgaatccaggtggtggaggttgcagtgagccaagattgcaccattgcactccagctcaggcgacaagagcaagactccatctcagaaaaaaaaaaaaaaaaaaaaaaaaaaaaacttggtttccccttcattttacaggtatgttaaagaggaaaaaaatagaatgcttaacatgttgctacttgtgtacaaattgtattaatcattatatgataaatgtttccagatggtatctattttatggtacttagactttctaacttttataatgattactatatatacgttttctttctcctactagattataaactccttgaaggcaggattcatgtttagtttatcttttcataaaacttagctgtgtgtattgatttatacatatgtatttagtaaatatagcttgattaattgaataaatcttcatatgtagtagatttctgtattgacttctgctggtataaattttctctacaaagtttgatgagataggagtgatggggaaaatatgaagagcattaatgtatcattttcatttccactagtatctttgctagacccctaatctccagtagttaaagctttgggttatgaaaaggaactccttgtctccgaagtggtagatattttttatgatatgttgcaaaacaaaaagacaactttttagttcagaagggaaccagcatttattaagccctagctatgtgctaggataggatcttttaagtagtcccagatccctttgagaattcagaaaacctaaataaaacaagaaagaaattttaattataaaagaattatctccaaaaagtttctccttttcaacctttcatgcttttaatatttactatgtaaattgcctaagaacttaaaaaacagggacagctttccagtttattttatgaagctaacataccaaagacacaaaaaatgataggcaaatatctaactttagatttttgtcacataagtgtatgtgagactcttaaaataatttaccagaaagtgtaattcatcagtatcagtattttttctttaaaacctcttttttttttttttttttttttgaggcagagtctcgctctgtcgtgcaggctggagtgcagtggcgcaatctcggctcactgcaagctctgcctcccaggttcataccattcttctgcctcagcctcctgggtagctgggactacaggcgcccgccaccacgcccagctaattttttttgtatttttagtaggcacggggtttcaccatgttagccaggatggtctcgatctcctgaccttgtgatccacccgcctcagcctcccgaagtactgggattacaggcgtgagccaccgcgcccggcctaaaacctctttctaaagagaatttgagacaaatgcaacagcatattaaaacaatagaatagtagaagtaaggcttatctttagaatgcaaagaactctactaatattcctccacattggtagatcaaggaagtaaattcataagattatctcacttgctacctgtaaggtcatatagtaaagctcagtattattttgggtgtctgcttctggctaagacagactagccagtgtcagaccaaccctgccgccgggaactaaaatgcttaggtaaataataaaaagcaactgtttgaaggtattagaagctactaggacactgaagactttgaggccaagatcctagagagaagggaggtctaaagaggcagaataaacatttggtgccacatgacccctcagaagcatttgccagcttcagtgctaggactgaaaacctgaacaaaaagctgaggttgagcagctaagcagagttttcaatagatgtcagaggcgggggtcacaaaaacgggagttcagggatgacagaccctggtaaacatcccaggcttttggttggaaccacccttcttaccccctaaaaaccccaactttttaccctaggtgtatggtgaacctaaaaattttcctgaaatccagccctcacaaaacacaaaaacttagttttgaattggctgaaatagattaaagtgattcacccttgctcttaaatgcttgtcagaagcaaaactaaatcctctctagaggaaggtaacattcacagcctcagcctatctccacagttttgtgcatgcaagattaacattcagtcaaaaactaagcatataaaaagaggcaggcgataaggttacccacaggagatctagatattagggttatcagacatggaccttaaggtaatgttgataaatatgtttagtaaattaagtgacaaatggaggatttcagaaagaactggacactattaaaaaagttaaatggaaattctggaattgaaaagtgcaatatagggtgacaatagtttacaataatcttttgtatattttaaaatagctagaagagaagaatttgaattttttaacataaagacatttaaggtgatggatatcccaattacactgatttgatccttacaaatcatatgaatgtactaaattatcacatgaatcctgaaagtatgtgtatctgttatgcatcaattaaaaattaaaaagaacttttaaaagtgcagcaactcaaattaggaattaaacaggagggtttaatagtattcttagctgaagaaaaaattagtaaactagaagatagatcagaagacaatatccataccaaagcacagagagacaaaaggatggaaaatgaaaagaaaaagaaaaatatgtaagagacaaatgggacactgttaaaagtctaaaatacttataattggaatctcggagaggagaaagaataggtcagaagcaatagtaaaagacataataacttgagaatcttccaaaactaatacagacttgcatatttgagaatcactgtagctctaagcagaatcaataccaaaaaacaaaaataaagggaaaagagaggaaaaattgccaaaacaaagaaaatcttaaaatcagccaaaggaggaaaaagatacattaccttcaaaggagcggcagtaaagacggacagtctactttgcaaagaaatggaaatcaaaatacagtggaacgatatcttcaaagtgttgtaagaaaataactgccaacctagaaatctgtatgaagcaaaaatatctttcaaaaatgaagtgagaatatagacatcttcagacagacaaaaattagaattcatcaccagcagatctacactagaggtactataaagaaagttcttcaggtaaaaggaaaattatcccagctggaagcatggagatgcaggaaggagtaaagagcactggaaaggatagatagacgaatacatctaaaataatgtgaactgtgtaaaacagtaaaaatattgataggtgcagcaaaccaccatggcacacgtttacctgtgtaacctgcacatcctgcgcatgtacctggaacttaaaaatttttaaagtaaaaataataaatggcaacagcaacacagaaagctggaagagagttctgatgggggaaaaacacaggttatttttcctcggctctcactctacaacagtgatcatcacagaggacttctttgaccaaatgtgtggatttctccccacgtgccaagcaagcagtcagttctgcagtggacaccagctgggtcggtctcaacacagaagacttctgtgagcaaatgtgtgagggtttcttctcacacatcaaacaagcaaggagttctgctgtggatatcaggtgggtaccctccaattccatttcaacattatctacctggagataactcagatctcacaggttgaagactcagtctccaggactgtccctccttgagacaccagttgcaagtctgggcctccagaacttctgacccactagcttcaagttgggattcccaccacccctctttgggttcagttaatttgctagagtggctcacagaactcagggaaataattacgtttaccaggttattacaaaggatattatgaaggaaacagatgaagaaatgcctagaacaaggtatggggggtgggtgcttccatgccctctctgttgcaccgccctcctggcatctccatttgctcgggcatttggaagctctccaaacccaatccttttgggtttgttttgttttgttatgttttttggttttttggttttggaggcagtctcactctattgtccaggctggagtgcagtggtgcagttacggctcactgcagcctcaacctcctggactcaagccatcctcccacctcagcctcctgagtagctgggactccaggcacgtaccatcatgctaggctaattttttaaaaaaaattttgtagaggtgggggtcccactgtgttggccaaactagtcccaccttggcctcccaaagtgctgggagccactgctcctagccccttttgggtttttatgagaacttcattatgaaggcatcattgattaagccattggccattggtgatcaacttaaccttcagcccctctaccctccctggagattggagggtagggctgaaagtcctaaccttctaatcctgccttggtgtttatggagaccagcccccatcctgaagctaacaagaggctgccagctatcagtcaactcattagcatacaaaaagacattactttggagtttggaaggattttaggaattatatgccaggaagcaggatcgaagaccaaatatatatttcacaatattacaaagataaatatagtttaaatgtcctcaggtctttgtaatttatattagattttaatgagtcagagatagtaatatctagggtagtccttctcaatcacatttggtgagagaatcacatcataatgttcaaagacagcaaacttcaacctgtgggtcaaatctggcctgccacctattttagtaaataatgttttattggtggaacaccgctatgcccgttagtttacatattgtctatggctggattcatgctgcaccgccagaattgagtagctgctacagagacattgtggtccacaaagcttacatttattgtctagcccttgatagaagagatttgacaacccctaggtattgtggactgagtgtgtgtgttccccaaagatttgtatgttgaaattctaacctccagcgtgatggtgttaggaggtggggcctttgggaggtatttagttcgtgaaggtggaaccctcacaaatgggattagagacacagagttcttgcttctttctgtctactctctgccatatggggacacagcaagaagaatgccatctgcaagccaggaagagggtcttcaccagaacttgaccatgatggaaccctggtcttggagggtctatagaacccagcctctagaactatgagaaatgtttgttgtgtgagccacccggtctatggtatttttgttagtagcagccagaactaagacatctgtgctaaggcatctattatatattatgaattaacttctttacatttagaatgccttgtaagaactgaaaaaaaaaatagtcactcagaatgttttctgcaggacataattctttcatagaacttgagttgattaactctagagtaatcactaaaaggatagaaagagaatttatagctaccaagctaatagagaaggagaaaggaaataaaataataaaaaccatttactgtccaaaaaaagacaaaaaagaaaaaaggatcatagaataggaggaacaaggccaggcgcggtggctcatgcctgtagtcccagcactatgggaggctgaggcgggcagatcacctgaggtcaggagtccaagaccagcctggccaacatggtgaaaccccatctctactaaaaataaaaaatcagctgggtgtggtggcccatgcccatagtcccagctactcgggaggctaaggcaggagaattgtttaaatctaggaggcagaggttgcagtgagccgagattgtgccactgcactccagcctgggtgacggagcaagatttcatgtcaaaaaaaaggacaagttcaaaacaagtagtaagatggttaatttaagtagtaacagacaaaatggactttaaggcaagacatccctagaaacaaggaaagtttgtaatgaaaaatgagtcaatccaccaagaaatatgtatgcacctaataacagagctttaaaagacaaaagccaacagaaccaaaaggacaaaaagatagattcagtgtccctatttcttctattatacacaaattagggagagcaggatatttgttgaatatggcgtaaattcacagaccaactttcatattatacttaatggtaaaaccctgaaagcagtctcttactgttataccttataacccacccctagaatttctgcttcccattctagcaactgagttctgctgggatttggagttcttattttccaatagggaatgttactaccagaggacacagaaaggttccattgaattgaaagatgaggctataacccatttgggactgttgatgccactgaaccaacaggtaggaaaagaggtcactctcctgactagagtgcttaattctgattaccaaggcaaaatggggtaatgctatacaatgggggcagggaggaggatgtttgtaactcaggattctctagagtgtctcttagtacttctttgcaccatattagagacaaaatgaaaaactgcagtactcaagaaaaggcaggtctgttgaggagtcacatgtttcaggaatgaaggtttaggtcaccctgtcatgttgagaaccctgactggctgaggttctaattgaggtcacaagacatgttggatgcatagtgagagaagaaagttagggacaccatccatgcgttcataaccaggtgcagaagcaaggattgtagtaacttagcatattttttcttgtgtctgtatgtttatatgtattaactttgctttttccccccttattttatatataattactggaagttaattaatttgatctttagagaacagaatatttagtgggactgttaactgaattttaaggagtaattaatatagccagtgattaatacaatgtctgttcggactgcagctcctcattttggggagaaggtgagaacatgttcatttataggaaggtagctgcatgttaccttcatgtggaatcagagttgttttgatacttcaaatatagagggtgtgtatggaagccaagtagccaaaggggtggactgtgccaattatttattgttgctcagttcccagtttatgtaaatccacatccatttatgccctgcttttgatacaggagatgggcactgtagacatttccctttggtgagctggcttcactttaggctttgccaatggaagcactggagacacaatgtaaggaggaatagaggagaaaagggtcttcccagccaggcacggtggctcacgcctgtaatcccagcattttgggaaaccgaggcaggattgcttgagcccaggagtttgaggccagactgggcaacatagcaagacctcatcaatacttaaaaaaaaaaaacaaaaaaaaaaacagccacgtgtggtggcgcatgcattagtgtcagctgctccagaggctaaggtgggaggatcgcttgattgaggctgcagtgagctgtggttgcaccactgcaccccagcctaaatgtcagagctagattctatctcaaaaaaaagaagtagggggtatctctccactccctccttcagtgcgtgtgcttttggtgcagcagtcagcaggctggcataggagagccctggcagtgctcacctcagtggtgcctatgaagcagcctcagcccacctgtaccctcaaggaagtttctctgcctcccagtagggccctcctgtggaccacctcttccctgttccctcttctaggtctttctgctactctctagctgtgtgttctgtggcagccatgccctctccagtcctgcgtggagggatcttcctctgagttcttagcctcttatacgcacacacacacacacacactcttttagcttggagctattatagtaagtatctactttctgcatttgctctctctggaccccataaggaactatttttacccctctaaaaacataaccaccttttactagttaacacatcttcatattaactctatcctgttctagttattggtatggtttctggctcctgactattccctaagacttactaacaacattactatttaatctttaacgttgctgtctaaagctacgccagttaaataagacaggtgtattcattttctgtttttgcgtaacaaattaccacaaacttaagaggtttaaagcatgatcagtgttacttcataagtccttcatagttcttttggttataggactgaggtccttgtttccttgctagctgtcagaggaggagttctcaattcctaggctacccatgttccttgccttgtagcctccatctttaaaacagcaactgtgaggctgggcgcagtggctcacgcctgtaatcccagcactttggaaggccgaggcgggcggatcatgaggtcaggagatcgagaccatctgcctaacacggtgaaaccccgtctctactaaaaatacaaaaaaaaaaaaaaattagccaggtgtggtggcgggcgcctgtagtcccagctactcgggaggctgaggcaggagaatggcatgaaccctggaggcagaggttgcagtgagccgagatcgcgccactgcactccagcctgggcaacagagcgagactccgtctcaaaaaaaaaaaaaaaccagcaactgtgttgaatctgtctcatactttgaacttctgacgtcctctgtctctgacctctaaacccaaatttaaagggttaatcgggcctacttggatggatagtctctctgtcttaaggtcaactgatttgggatttgaattaacgtctgcacagtccctgcaaatagtacctacattcgtgtttgattaactaggggaaggtatgtgtatcccaggggccaggaatcttaggaggaatcttagaattctgactaccaaaacaggaaatagaaattaagccatgaaaaatggttgttatttacagcttgtatacccagaaaacccaagatgataagctaaaaaattatttgatgcagtatagataagtcagtaactggactagatacttaccatcagtaaccattcaggcaatccacaggatatttgatctaatacataaaaatcaattttaaaaaaattataaaatacctagacatgagcttaacatgtacaggaaataaatatgaagaaatgggctgggcacagtggctcacacctgtaatcccagcacttggaaggccgaggtgggcggatcacccgaggtcgggagtttgagaccatcctgaccaacatggagaaacctcgtctctattaaaaatacaaaattagccaggcatggtggcacatgcctgtaatcccagccatttgggaggctgaggcaggagaatcgtttgaacgcgggagacaggttgtggtgagccgagatcgcgccattgcactccagcctggacaacaagagtgaaactccatctcaaaaaaaaaaaaaaagaagaagaagaaatgacaatttcactgaaagagggaaaaaatggagagatgttctcaaataggaaaattaattcttacagagctttcagttaatttgtatgtttaaagcaattctaatttttaaaaaatgtatttttcttttggagcatgacaatatggttgtaaattttatctggaaggataaaagaataaatactttaaaaaaataatgaaaggaacctagtggtagcagataaccaaaattttatgaaactggaataatttaaatagtgtcattgtggcagaagcgtgcagttattaatggagcagaatggtcttcaggcccatctgttatacatgaatttgatgtatgaagagccattgtcacaaatgagcagagacaggaaggatcatttagtcctcgtgcactaaatgactcccaggcactgttagttacagaaaagaaggtagatcctagtgtctaccacataccaaaataaactttaaatgaagtatcatctgtataatagaaaaaattttaagaaatctagagaataaaaagagctaatttgaatagttcctacaaatacaagtaaaatctcatgaaaatttttggtagaatttgattagcgtttaaaacttggtgaatgccaaaaacaaaaggcagacaaaaactgggggaagtgtttacagcaacatgattaaaggttaatgtatttaacatgtataaacttaataagttcattatgaagaagcccactaagaactgaagagacgggccaggatatatagacaggcaatgtacagaaaatgaaattcatgtgggataacaaatatggggaaatatgttcattaatagtcaaagaattgtaaattaaggccactgaaatactttatcagattagcaaggattaaaaattataatactcagtgcttatgagattgttgtgaaataagcacacttgtattcagctaataaaactacagattattaaaatgcttttggaagcagtttcataatgaaacccttaattatacccttttgttttaggaagtctgtttctggaaatctctcctaagacaatcacaaatacagaacaaactggaataatcaccaatacagaacaaatataaacaaaggggattagtgataaaaacagtgtcaaatggaaacacctaaataagcaaccggggaattaagtaaattatggtccatcaacaaaatattttgttgtcattacaaattgtatttgtggagtttttttgttgtttgtttgttttttggagacagagtctctctctgtcgcccaggctggagtgcagtggcgcgagcaccatctcagctcaccgcaacctctgcctcccgggttcaagcgattctcctgcttcaccctcccaagtagctgggattacaggcatacaccaccatgcctggctaatttttatatttttagtagagatggggtttcaccgtgttggtcaggctggtctcgaactcctgacctcaagttatccgcccgccttggcctctcaaagtgctgggattatagatgtgagccaccgtgcccggcctgaagtaagcattttttaagagtgtaaattaagatggtggtcaactgtgtaccagcagtactgtgccaattagaaatatttatcagctatggccaggcacagtggctcatgcctgtaattccagcactttgggaggccaaggcaggaggattgctttaggccagaagtttgagaccagcctgggcaacagggtgagactccgtctcaaaaaatatgagaccttgtctctacaaaaaattaaaaaactaaaaaacttagctgggtgtggtgtagcctgtggtcccagctactcaggaggctgaggtgggagagtcacttgagcccaggaggtcgagtgaactctgatagcaccactgcactccagcctgggtggcagagtgagacgctatctctttatacacacacacacacattttccagctatttatttttccattgcatcttcttcccagcatcagaatttcttctcttcatctgcccatctgtgaatctgttctcacagaagattattcctgtactttaatgattcctcccgttaaaaactcacagcttccatttttgcttttctcttcttttatctgagcatagagtccacaaaagtttggttataattagcatttttaccaccaggggctattatttgtatttcaaacagtttttcaaattttaaaactgcttcagtggaatttgaaactatgcagttgtttctttcagtgttgaacatcattctttgggtgctgaatgtttaaattctgtgttatggtacatgtgtctagaaatgaagaacagttagtggggaaaataacattaatgttcaaggagactttgtgtacttttacctgagagatgcaagggtgtatagatttaaaatgtaagagccacattctggatcatcttcatttcaagtagttgtgtttactgccattttctaaaatgtaagctccacgaaagcagggacctagaacatcatgtggcacatatagtacactcttaataagtatgtattgaatgaaagattgaattttcaccgggtggaagtatctacaactagaagtcatgagtatgtagacctcagagcatctgaatttcttggaatttgtgtcacttaacacaatgttactttcttggcttaaagtggcagttctgaagaagggagggaccagccccttggcagacctttggaaggatggacttttgtttagggatgtcatgtgattcgagttgggcacaatggcatttagtgggtaggagccagagatcctaggtattctgtgcctggacctacttccatgcaagtaagactattagtacatctgttatgacttctgaatttcgctctggatattatttgggtgaaaaatttacttaagcttagaacctattttacatgtatagaattttttgtgctgttgtaatatatgctgagtttctggaaactctgaaaagcaactgtcatatacattcagggaaggttgtactttgtctgggacttgctcagtagttaattcatcatttgggaaatctcttcacctgctaatcagtgccagtcatggaatttgagttgcaatgccaactttattttcttcatagtacttaggaaattacttatgaaaaactgaaattactttgtttatttacctgtgtttgtatttgtttacccactaactgtaagctcttgataatagggatcttacgtatcttgtcagtggatatccttatacctaaaatcaactctggcacattgtgtggccagttattaataaatgatgcccaaataatggacagatgtttgaatgagtgaatcatccccttgggcgtgatctttatatgctgttgttccttaagcccccatctcaggccctctttcctgtttactctcaaactcccttcctacctgatctcagctataaccctcactttgatttatatttctgcattaacatctcctgaaatttttctccagtctggatctttcctgtgaactctggaattttacattcagctcccttccccagtttaatgtttcaagcatctcaaacgcgaggtgtccttctccagtgtttatcttagtgaacggaccaccatacacttagtcacactggtgagaagcctacggattgttcttgacacctccctctcccttatacccatatccaattcatcacccacttctgttcattttgtcttctgaatggtgttcaagcctgctttgcatccccagatctaaactaccaagtctaaactcttatattgactgcagtagcctacgcattggtttccaccagtccactcttaccttcttgtaatctattccacataggagccagaatgatctcatcaataactgattgttactcccttgcttaaaattcttcattggcttctcattgctctgaagataaagacaaaaaaatttaacctaagtcttccccaccagactgggtgtagccatttctttcattgctctgcagcctttaggccccccatcatcttgccgtttctcaaacatcctgtgtgccttcccactgtagaactttcatgcgtgttgtcccctgttgtgccaccaggtctccttcagaacttagctcactttcgcaggaaatctgtgacctcctgaccagccagaatccttcctcttaagtgctctcatagcaccctgcacttcttattagcatgctgtaattaatgtattatgaaggaaattgtctgtctttcccatagaattaggttttaaaaaattcattaagtgtaggtatggcctcagtataatgtttatctatattatcaccataaagaatggcctgctagcaactatggcaatttgtcttccattatctaattggtttttactcagtaatttcatagggtcaatcagtttgatttgttacttcaggggcacgctgtatttcatttattctaagaagcacatttttcccatttttaacatctctgaaattgacatgcatcttacagtcaatggcctatatatcatggtataattggcagcatttttgtttcttagtgatgcataaaataatggtgcatcttatattcgaaggtagattaggtataaaagttcgtattttataacaaattcattctgtaagggttaccagggatgtatgttgctcgttattctgtacaagtgttaataggatttttctgtagctatagcaggtaactgatgatatcttgatcccttgaagaaattctggctgaaatcattttcatcatattcctgtagagtcaaatctcaggggcttgatgtatgtattgtttgttcaagtcacacacaaacccaaatttgtatgtgtatctgttttgttttagaaaaattattttttatctatgtgtggaggtgggcagccatccactggttccagagatggtcaactaaccccctgaatgcgttctccccatatcttcattttgaaagaagttttagatgggcacgtttagagacattttccccagccttccttgtgtctagatgtgggcaagttgtggtcacttgaatgtgaacagaaataatacgtaaacttccagggcatgaaccaaaaaggaaataatttgctcttcaattcctcttttccttcctctagtgaataaaacaaactttgaacaaggatgcttggccagcctctctggactgcaggagagaaacatcttgagcatgttgtattttggggtctctttattatagcagcttcgcttttactctaactgatatatatataagaaattgttttgattatcctcttcaatttccaaaaaatgaggtcagccttactatcagttcattgtaagtttgaagcatacggctgtcacttttggaccgcagtgaagaatatatgctctttagggatacagcgtggtatggatgcagcgtatgcttgaaactcagtccgacctcagttgaatgacgacagctctgtggctctctcacttactgtctgtgtctgtacgcagaggtcctctgagcttcatcctctgatcctctccttgaagatgcaggtgatacctgtctcaacaagatcgatttgaggagcgaatgaagtcatctatttgaaagaccttccgagcccagtgctgagtaaatgacagctcttgctaccattagtttttccaaagactgtcacttcacactgtctgctgccctagtatctttgcagttggaactcggtatttatggaggattgtttgattttctaagttttatcttaagattaagcaaaaccggccgggcgcggtggctcacgcctgtaatcccagcactttgggaggccgagacgggcggatcacgaggtcaggagatcgagaccatcctggctaacacggtgaaaccccgtctctactaaaaatacaaaaattagccgggcatggtggcgcgtgcctgtagtcccagctacacaggaggctgaggcaggagaatggcgtgaacccgggaggcggagcttgcagtgagtcgagatcgcgccactgcactccagcctgggcgacagagcgagactccgtctcaaaaaaaaaaaaaaaaaaaaagattaagcaaaaccactgggaacgttcacacttggactgtgttgccttggccccccagataattgctgactttttgcaaattccttgagttttcccgtcatgctttttggctgtcaagaggctgcagaagatgatttaataaagcctaccctggcacacacatgctagcgcaaaaaagaagctgtctagtgcatgactacgtcgcctgtgtgaggtacccactaaaataacttacttttagacctgaatgctagggaaactttttcttcccttgtagaacaggtgggtgttcttatggttcatgagaatccgtaaaggacagagagaggaattgaatcaaatagtaaaataacgtggcaaattttaggttacctctgagtacgtgttaatccattagtagatgtggttccattaaagtcttggaggaggtaaactctacacttattttatttttattttttttttgagatggagtctcactctgttgcccaggctggagtgcagtggcacgaacttggctcactgcaacctccgcctcctgggttcaagcgattctcctgcctcagcttcctgagtagctgggattacacccgccatcatgcccagctaatttttgtatatttagtagagacggggttttaccatgatggccaggctggtctcgaattcctgacctcaggtaatccacccgcctctgcctcccaaagtgctgggattacaggcgtgagccaccgcgtgcggccctatcacttttttttattttaaaagaaaccagaaagccaaaaggtggcaattagcagtacattgactttatgagagtaataggaaatatttgcttcttgagattggtatatgaacatagtattagatttacagttcataccaattttatgctttgaattttagtttttgatgtaagatagtaatttccaggaagttgtttaagggacagaaacaacgagctataactaataaatacttgttagtatacaaagtatgggactatgcagctcacagtctcaaatgtgatctcagtttgctccagtaatcagtatactggtttgtgtttatttaatgaatgactaaagactaaacttaattagaacctttttttttcttatgaggtagttcccttaggatctctgtctaaacttttgcagggtgtgggcagcatctgaacctgttgcgtgtttgaaaacaggaaattaaaatgtttttctgttaattgatatttttcaggtaaattttcttcattttatgaaatttaagtttttacatttcacatttttaatgtgaaatattgacaagcttcttggtacctgtgggggttgtttcctgcagcaatataatcagtcacttttttttctattttgtttcattatagaaactattggctgggcaccgtgtctcccgcctgaaattccagcactgtaggaggctgaggtgggcagatcacctgaggtcaggcgtttgagcccaacctggtcaacatggtgaaaccccgtctctactgaaaatacaaaaattagccgggcattgtggtgcatgcctgtaatcccagctactcaggaagctgaggcaggagaatcgcttgaacccaggaggcgaaggttgcagtgcaccgagattgtgccattgcactccagcctgggtgacagattgagactgtctcaaaaaataaaaaagaaactatttaggcagacattcatgtcctttatcagcttattactccagtgtaaacccctgaaactcctgttattctcacatgcaagccctgggcttcacagatgtttctggatcaagggactgggtggatggtggtatcatctctttttatatttgatttttctcttgtgcagattgtcatcggactttctgcccaggtcttgtatgctcacctgctctcccaaattaaaatccacctttgaacataagttagtttaatggctcctgaaactgaatccacacagttaacagtccttttagttcacaaaattgcaaaacctttgaatagaaagccaccctggggatcatctgcagtcagttctcatgtagttgttatattgataactgccccaggctccgtttcatcacttcagtgacagaccaacgcttatatggtgctgggactttgtcctttcttttttgtaattatgaaggagaaccttttctaaacttgcccaaatatgccacaagtttcagaacacagaaataccatgaagtttaaaaaaaaaacaaaaacaaaacaacaggcaagtgccaaattcaagcaaaaataattatttcactccatctgtcagggttgatatttcaggtctttgtgctattggttaaatacagcttgttgttttatactttgatgtaatgttttcatttaggcacatctgtgaattttattgattgattggtgtgacagtatttaaaagtctccagtttattgataggattgaaataagctctaatttatgggctcctctatcagccaagagagagaaaccatacagttatgtgaacagggaaaggtgactgtcaagaattgttaactgtaatgggattagaataatgagggattggctagtcagaataaagaaagccttagaggattcaggaatagcagatataaggaggagacccctgcccccagcctgaggtggaacatccagtgagagatcacagccatggctcacggggtggcagagaagtcactatgatgctgtgttgacggaacttgaaagcagttcgtgggaaggcatctcaccagaggcactgtgtgtgcaggggtggcgacatggctggagtgtgcctgcaggatcctgccagggagccctctagccaggaggcagaactcttctcctgctatgtctctagtgccctgtactgaaaaagctgaacatcatgccagctggcaaaggaaaaatagttaaaggtcacagatccattttcacagagcaggcaaaaagcagagtttggcactgagaggcaataaatccccacctccaaactcctaagtagttttttgggaaaagcattatgcttatcagtggttacagaatacatattcctaagatttcttgcaaacaatgaaatcccaagcattattaataaccactctgtaacacataggccaggatgtaccagcaaggactactgtatctgagagactgattggagattttcttctgttactttagcacatttaaagtacacacacacacacacacgtgtcattatatagttgactgaaagtggagtgctagtaaaattatactgtcattttctgacttaatttgaggtgactttaaactcagaaatcaagaaaaggttttcacaacgtggtacttaaaactcccatacttctagcatgggcaacacagcaagacactgtctccacaaaaaatttaaaaattagccaggcatggtgatctgtgcctgtagtcccagctacacaagattctgaggtgggagggttgcttgagcccaggagttcgaggctgcagtgagctgtgatcataccactgcactttaacctggaagaaagagtgagaccctgtctcaaaaacaaacaacaatcctcccatatttgtaatggacatgttaatatggcaatactaaagtaatttttatagtggtaaaagtgtttactgaacctacttagttaagacaaatcgtaatcaaataatgctgcagccagtcagtgcttactgagtaagccgaggtttaaataaatagattgttgataaactacattatcaagattccttggttacagacagtgggaagcaactgtacaaatttaaggagaaaaaaaagaggaacatttggaaggaagtgaggtagatgacaaaattgaaggacaagctggaaaactaggacacaacccgtgcagcctagagaatccaggtagcaggcactgatggcaggttttgtagggcacagtcagtgcggtgaatccactccaggtgtctgccacttcaattcagagttcctattccaagatatgtcttgattggcctactgtgagtctcatgctcaccccttggtcaggggacggcaaagcactgagataccaggctgcaaaaacaacttattcctgaactcaagagggcatacctcacagacacttagtttttctctccatttcttagttcccttctttggtgttggcttcattttttggctctctctggttgaaagatggttgcagtaacttccagccctctgattctgtttggttcacatccagggtcatccctgaatctgagcactgtggcccaggggatgctgtgcccttcgattagtcagacacaaaatggatccctggagccactgcccctagaagtccacagattgtgggtgagaggaaaatcaggatacagataccagtgagaggaggaaaggaagctgagtggcagagtaacagacagttcatcaaccttatttcacagagacagccaaccaaaatgagaagcattacttgttctgtgataaaaagccaaatggaagaagataatatagaaagacattggtgaagcaaggaggtggaatacctgtgtcagtggctagacaagaagcaccataagatgctgaaaaggtgagaggccaagagacgcgtttcttaagaagcgtggtcagttcaggctgcggtaactccatactgggctgcggggctttgtcttgttttgtttgagccatgatagtgagtctcgagaattaaatcctggggctgaagtctgtattaactctaaaatgaaaataatatcagggttcctttgaaatacctgagaccagctgattttgtcatacctctcttacgatctccgtgattcttcaccacccttccgaagtataggtccctgctgtcatctcttcctaactagtaatcaaatcccagtgctgctctgaagtttcctcatccttttctccagatcttttccccctgccttgtggtgcatggtcctctggttaacaaagacctttatctttagctctgcaccctcctcaatgcccccaacacatactgtctgcacttcattgaaaccacttctcatcaggccaggaatcagggtggagcggaggcatgagggaaggattcaacattatcctgaacccttttcaccataaccatttataacgttgttttttttttttatttttttgagatggagtctcgctctgtcacccaggctggagtgcagtggcgcgatctcagctcactgcaagctccgcctcctgggttcatgccactcctgcctcagcctcccgagtagctgggactacaggcacctgccaccgcgcctggctaattttttgtatttttagtagagacggggtttcaccgtgttagccaggatggtctcgatgtcctgacctcgtgatccacccacctcggcctcccaacgtgctgggattacaggcgtgagccactgcgcctggccgacaaccattttataatttttttaaattttgtttcctgtcattccttttattcactttttttaaagtttatttgcagtaccattcactctgtggtgtgtagttacgtgagttttaacaaacacatacaaccatataaccatcatcacgtgaagatgcagaataattctgtcgcccaacaaaacaactcccttgcactgcccctttgtggccagacccttcctcccaccgacagttgctggtctattttcagtttctacaattttgccttttcaagactgttatataagtggaccctacgtgacatagtcttttgagtttggctgcttacatttagtatacgttatatccaagtatagttttctttgagtttatcttgtttggtattcacagagctttttgacttataaatttatgtatatcaccaaatatgggaagtttttcaccactatttcttcaaatatttttttcttcactgatcttccttctccacctctgggcctccagtgaaatgaatgttgggtcttttagtattatccttcaggtccccgaggtactgttcatttttttcagtctctttgttttccaaattcagtaatttttctctgttaagttcacgtactctttcctctttcatgtccattcttctcttgagcctatccaatgaagttttaaattcagatggtttagttttttagttctaaacttttatttgtttactcaagtgtatttttatttgcctcctggagcatagttataataactgctttaaagccattgtctgataattccaaaacttgggtcatttggccattgatgtctgttgtctttcgccctgacagttggccacatagtctggttctttgtatgaggagatattttggattttatcctggacgttttgagtatgtcatatagacttttagtactatcagactcttctagaaaacactggtttgttgttttgtttttgttttagcaggcaatcagcctgggtaggttcaaggcttccagtgtcagctcagtactaggctctcactatgctgctttgggcctggcccacatgtaggagttagtctgaggcttggggcaggggggtgttgacatcgtagttcagatctcacagcctttgttctgctgttttgagtctgccccataaatgcataactcaaaggtgagcccaaaatggtgaaggtttgtacacagaattgggagattcccttttccagctgatttctctctgggatccctgactctcctgggatacgtccagctcacaggtgctcctttctttagtcctctgctgcgaaagatgggtttctcttggttgtaggtgtcagtgccatgcctgctacagcatggctgtgattggggcccactccctgggcaaaggtttgagaaaaggaaatgagaaagtcacccccacacagattgccttccctacattttaactcctcttcccaaaccacctacttttgttacttttcattatttatgtgtttgtgtttatattatactttgtccagtttcgttgttgttgttgttgttgtaattggcaggagagaggctgtagctggcataatccatcttgcccagacccagaaggcctgactccatcactacctggtttagtttgctatgctgcgtaacaaataccactaaatgtagtggcttaaagcagtgcacatccattgcatggtttccatgggttcaggaggctgtacttacctgggccctctgcaaagctgtgcagtcaaggccaggagctgttttcatctggaggctctgctgggtagcgattggtatccaggcttcctcaggctgctggctgaatgccgttccttgcagcagtaggattcatgacagcttgtttcttcaaagccagcagggaagagggagactctaaagccagtctgctagaaagttggagtcttacgtaacacagccagggagtgacaacatacacctttgccatatttcaatggctagaagcaagtcgctggtctctctcatactccacaggaagggattatacaaaagtgtggaaatcagaagaccatagagtctgtcaagcacaggtcttcttcacaacttctggtcctgttggtcagagccatttggcaatgagtcgccttttccaccccaagtccaggtgtcatgctgagtgacttaagcattcttagaggcagtccatccaatatgctggcttacaggctttggaccttctctataccaatgactttatttcactttagaacccagtccttgtgactctaaatctcaagcatactctctattctgtttctttccatagtctatatagagtattaaatataattaaagttttaccttgtctttccttttagattttatgctcaaggctgagactattttgtcttatccttctcatactgcccacaaaagtctagcaaatacttcctgcacatagcagatagtcaaatacatgttgaataaattaagaccataactatttctatgacaactgcatagcctaccagttccgtccccttctctttttaattttgtctgataacattttaccagcccttcctaacataaacactgaaaggaaattctaattgaattagtcagtttcaaaatagtggcatgtaacacacacactctctgtctctctttctccctccgcccccccccccccacacacacacaaattagtgaatattttgatgacatggcattggagtccaaccagtataacttcagagtatggtctctggtgttctttgtaggtgaaactaaggacgagaaacatttacaatttctgataactaaacctcaaagacaaaaacaggcccctgccctcttttattgaattttcttcttttacaaatataggaagtagtcaactaacaaaaagactggtaatttgtaacatttttcatccagaattgttttgcatgaagtggctggattctcagtctacctacataatttcaccttttgaatcattatttctctttctccatcagaacctctgaaacaaaaataaattattgtttctctgggaaaatctacagtttaactaggaacaccgaaatgatacccacagaggcccatttgtgggaaatcttttcaccctttcctcctcctagctgcctccaaaatatgagtgttgctcctttttctacccagagcctcctaatcttgtgattgctaaattatttgagaatgaaagaaacaaagggaaaacccaagttattaaaaaatgttttcttcctaataaaactcagtacagagggatccactatagtatacctcaccataccatatgaggtataggtaatttatatccaatttggcccttcaaacttgctctgggcccagcagttgagcccatatcagatttcctccttacctagttgccgttgctactgaaacataagctgaaacaccaatcgaagggatgcttttctcttcagcagagctggataggacagctggagttctttgcagtggcggtatactggaaaggaggtgaagatgtatgaatagaagaatgactgaataatatgataacattcacaccatggtacattatggagccattagaaataacagattggacatctcagtagggggagggagagagaagggagatcctccttccctgcaagtattgaatgagaaaagcaagttgcaaaaaagtttctataacataatcccagttataccaacagtgatccaataaaatctttgtaaaaatgtttaagtatatatgtttttatacagttacacgagcagggacaaaaacaaagatatgaatctaggtggttttaacgtgggtcatggggggaggagatatttgacagggatatggaagggggagaaagtagataagggatgccaagcatgtcagaaacaggaaagcaaatattgtcctggggggaagcatgataagattatatttacaaatgtatgttgatcatgtatatttaaacgtaattttaaaaagaaaaagttctgtgattaaaaagtaaaattttcccagtctggccattccttttctttattctccttgcttcttgacttataaatttattttacaacttagaaaaaatacaaattgactctccatttaattgatacatttgttttttttttcttttaataggtgaaaacacttttcaaatccaagtttataatttcactgtgcaaggtagacagtaactttttaaatactacttgatcatatcagaaaataaagttttccttaaaaggaaaacttacagattttctccactgtaaatttcagctgagattatataccagaaattggtaccagaaatgccctgaagagtaacagattcttctcagggccgcagagaaagagtcctcctaccaaggcacttatagtccagaggacagaggaagctcataatctcatttaaagccaggacatgtggctcccgactgtaacagaaaaatagcctttgcaggaggccagcgcccaggcagatgcagatgttcatcttgtcaaattctcactgcattttatacttgttgctgttgtaatagcgataatttgttttactgatttttgtaaatatctttgaaagtatatgtattcttatcttgcttcctgctataatcccagagcacttataaagctattgttcaggctgggtgtggtggcccacacctgtaatcccagcactttgggaggctgaggtgggaggatcacttgaggccaggagttcgagactagcctggacaacatagcacgccatctctgtttacaaaaataaacaaagcttttcttcagaaaatacttattaaatgaatcagtccccacctccctccatccttgtttttgtccctggtgcttactacaataaatagcacatgttagttgtatagttcttcagtgattgaattagtgaacatatgagatggacttgaggtgtagactctctaggaaaagaagtgattaaaatagcttagaagaaaaaggaagagtcaggaaatgggaagattcagtgaggatcaagaacaggtgccatgtaaatagtgataagaataggaagttatggtcagaatgcgggatagtggcatctaaaatttcagcagtggtgcaattctgggtggttagggtctagtagctaatactatagataaagcaccctggtgatcaggtgggggaaactacatgttttggcatttgaggttggactggtaaaacagccagttccctacctaatatccctaaagcaaaacccactgcgaaggaaatccatcccatacatacaaagcccctaattggtatttcagtgcctgaacagacaaccaagggttactacagagttgaggaaaggctttcagatcagagagtatctaagggaagaggcatccagagaaggaaaaaagatatgcagaaaacttagaagattttcagagaaaagaatagagatgattttgcatacctaaaacaagaacagggtgttgtggaaaaggagcattcaagagcacaagaaggttaacaattttaaacatcacaataaaaaactcagtagaaggattagaagatcaagttgaatcaagcaccctcaaaatagaagcaccaataaaagagtagaaaacataagagaaacaacaagttacaggtgatcaatccaagagattcaatatgttgttatttagaaacagaaggaaggtgttttcaagaaaatagagaactgaaaggtatgagctgaaagcatcagccaaatgccaagcacaaataatgggggagaaaagatacatcaccctgaaatttcagaaccctagagatcaagtggaaaaaataaagcatggccaggcttggtgcgtcacactggtaatcccagcactttgggaggccagggcaggagatcgcttgagcccaggtattcgagaccagactaggggctggactgtaggagctgtatcttactccatatcatacccttatccccagcaatgcctgatgatgggttggtgttcaacaatgtggactgaatgaatgagacagccggctactgaagaagtcagggcaacctgcagtgctgttagggaagtgtccctttctagcaccttctcagagggtcctcctgtataccatatgcgaaattctgacttaagatttggagcagctagtgctttttcattgtttgacttaacatgatcatcaaacttatactagttttctttgtatttaatagggagaaagagcaagaaacacaagaagaggaacgtttgatggaagaaaagaaaaagaaaaagcaggaagaaaagaaaaagaaggaaggtgctcagaaaaaggtttggctgaagttcctgcttcattgtctttgtatcattgtgtgtctcatttgcatcatcatagccattatatgacaaggtttcattctgttactttttaaatcaatatgccaagtctataattagcgaataatagatatcctactggtgaaataaatacaggtgacagccgtaaatgtctaacttggaactggaagtgttagagctgtgttttaaggaagctgtgttttagttgctggtggtgaagtgtgtccatgttgttctacttaaaatgaactgtcctgaacaaccatgtctaataaatgaagaagggccattcaactgatcttattagaaaagctagaaatattttttttttgcagctttggcaaatgttcttttacgaatcctattagtaaagattaaaaataaaagccctactgtaaacttcatagtcaagcttgaattttatggcatttaaaataccaagttatgccatttgtctttgttcttacctagtttaatgtatcttgtagtttaaacagtatacctattagagcctgttaaaattatagagtttaaatgagctccagatagaattttttgcctttagattaacattggtatataatcaatggcatgtacacatttttcccactaataaattgtaataaattaactgggcaaaaactcatttttaaaattttcaatactaaaagtttgcttataaactttcatagatgtgtacattctacacattattcctaaagagtttctttctttctttctctctcttttttttttttcaggctgctgatcaaaaaaccaaaggtaagtttatttatatttaggggggtacatttatggcggtaccaaaatttttatgaccaggatgacttttttttttaaattgatggttaaaaaacgagaatctaagcctgcctttgaaactattttttattattcattgtgaaattcctcatttatcactggttttacatctgcatctcattggtatttggttaatctaaaaatgtctgaagaatgttatattagctttccaaacaatgcttttaaattttcttttgatttccaccaaacaggatcgaactgataaagttgattcagtttgaataagaacaaccaaaggatatctgcatttttttaaggttccaatttctcattgccaactatcctttataataaaaaagatatattctttctggattccctctttgcttattgatatgtaaaagatttctctttttatcctccaagtccagaatttgctggttatcataaaaggtgttggtggaaacacacgcatttctcactgttactcaggaactcctatgatgtgctggagattcagaatgaacaaactgaaagccatactccaagcctcttccttttatacctgtatgtttagttatttcccagtggttaagagcacccactcaggagtcacataaactagctctgtttaatttgggacaagttacttcacttctttaggcttcagtatctcatatttaaaatgagaaaggtagtgaatggttcctacctcataaagctgttacaaagacttaatacgattatttgtcaattcaaaataaaatgtaaaaaaaaaagactaattgagatcatgcaggaaaatgactcagtatctagcatataattggtgctcagtaaaggtttactataactgttattctgaagtttttttccactggaccatcacatgtacacaactgtacatgtagacacatgcactctcacagctaatactatgcttttgtgagacattttataattttcaaagttaaggttatgtgtattatctcatttgaacttcatagctgaacaggaaaggaattcgtttacagataatctcctagtgtgaattaagaggctggttcttggttaagaaccagttaatggtaaaggcaagacttgagggagtccaggtctctgaacctctagactagagtcacatgaagagagggagttaatgctcaatgaatattaaaaagcagcatagcaaaaaggacatttttctctgttatactctcagaagcactgtgaatttacataacacttttccagaagggtccaaaaggtttatggtacatagttgtgtatgaatttatgatcttgaatgaaaaacaatggtttcttactattgtcatttcaaaatacagagttaactgttctggatcatccatttcttcttcttcttcttctttcttcttcttcttcttcttcttcttcttcttcttcttcttcttcttcttcttcttcttcttcttcttccttcttccttcttccttcttcttccttcttccttcttcctccttcttccttcttcttctttcttcttcttccttcttcttgaatttttctgtctggtttagtaccagctatattcttcatcattgtcactgttttctactcaagtagtaacaaattgcttattactgaacagtgattgtgaattacattgtcccaccactttacgcagagctatcattttctattactgttctgatgagaattttcttttatttatttatttatttattttttttttttttgagatggagtcttgctctatcgcccaggctgggtggagtacagtggcatgatctcggctcactgcaacctccacccctcaggttcaagtggttctcctgcctcagcatcaccccacccccaccccataagctggggttacaggcacgcatggccacacccagctaattttttgtatttttagtagagacagggtttcaccatgttggccaggttggtctcgaactcctgacctcaaatgattcccccccacctcggcctgccaaagtgctgggattacaggcgtgagccaccgcacctggcctctgttgagaattttcattgctaactccaaactctactggatttttctcttctccttctatatcctctaaaatactgttcctttgggtacagtttatcagtaactactaactagccttagaatgggttgtagtaataattaatgtctttccaaacaaaaaatgctttttgaattataaataatctaacagtactgctaggtaattcattgatgaatattagcagcatcaaggtttacgtttttctcagactcttcattattactggttcaaaccaaaattcattgcctgagaaatattggttccaactttctgactggacacttttgtcgggtgacacaggttggcctgactgtacctatgatacatgttatagtactagtattagtgttcacacataaaattgatgctttcctaacattctagcattttgacttccctcccctgctccagattgtgtgtctatgagggcaggggccacatttgccacaaggcagcacccagaagtctcaaggccctgagttgtttgaatataggaaagtgtttagcaatttgagagagtccgagagttggatactcttaagagagaagctgcagttataaattagattgcataatatactgaatcaatcaacattgtagaagtttgaataattttggttttgataattagctcaaactagaccaaatcaattagaaattcccttactctgcaatattacacaccactcaactagtagcattcgtaaagccatgccccaattatttagcattatatttgacttaattttctcaataatagaaatgctttaaatttggatttgttttaaacattttcaaggaactttttagaatatatgacatgctcatctatgatactcctctaccttctcctggagaatattaactagtctaatccgttcttaatagatgagtctccattatagcattaattatacttaaaaaaatgtttgcatctggctataaccatcaaacttgaactatgaattcttatttaaaagactaatgccgaactgaagctaactggaaatatatgttttttgaataacttaatataatatgtagcatgctttcctaccctcccccaacaaatttgaaaattagatttctaggaagtctgctttgtaaaattaccactgaacagaaattttgttcctggctatcttttcaaattctgacctgtgatatctttgggtcattttctttttaagattcaggccaagtgagtacgtttgtgtgaaacactatgctgccaacattcatacccccatcctaccctgatgtgatcatgggaaccacgttttctctgcagccaggagatacacttttattcagccccgggggttttcactcaaatagttgattcactttggctttcatcagtttcttcctcttgactcccccttgattttcctctatgcctctaagtctgcaaaccctccagtggggttgacatcctgcactcctaaggagtctgggcatgtttctaaacctggaggccttttccttagttgtctcagagtgttgggttgttgttgtagtcaactttttcttatttttccctcctgtgatgaaaaacaaaagttatatattctgattgaaaataatttgagattatctaaagagaaattaaagttcactcgaaattcctctgtcctgagatatttacccattaacagttagccatccttgaatgcatctctctatgaattcatatacataaatatatatttatatggactctccactgctcccccgcagttagcactcctggatccctatcccttcaaggagctgcaccaagcaatttgaaaacctctgtgggagcctattcataaactagccctttgtaaattctgctgaatatcgtctttgcgttggtgaccaaagaaagagacagccgaacacaattacctgttaccttagtgagaccctagatgctcttatactgggggaaaagggaatcagatataatcctgttgccattaacttgtgcattgtagctctctgtggagtaactggggtccaagtgtcacttcagactggcatgggttttatgaccataatgagtaatcagttttctttatttttggcactgcccttaattgaggcacaggtaataatagctttatttgtgatatgatgaccttgggagcctaagttttcagtattgttttctgggtgttttcatggattgagtgagggtttttttaatgattaactatgataattttcataaatgtgaaaatttaattcagtgcttttagccagatttgtttaacttcataaagtagatgttttcatacaaaaagctcaaagttaatcttaccatgtatgaaagtgaataccttcatgacccattatggttcatggtccatatcattaatgaattatgtttttgtttttttgagatggagttttgctcttgttgcccaggctggaatgcagtggtgcaatctcggctcactggaacctctgcctcccaggttcaagcaattctgctgcctcagcctccagagtagctgggactacaggtgcgcaccaccatgcccagctaatttttgtatttttcatagagacagggtttcaccatgtttgccaggatagtcttaatctcctgacctcgtgatctgcccacttcggcctcccaaagtgctgggattacaggcgtgagccactgcccctggcctgaattatgatttttaagtcatatacatctgaatttatactttttttgagagagagggtctaactctgttgcccaggctggagtgtagtggcacgaacacagctcactgcagccaccacctccgaggctcaagtgataccccaacctcagcctcccaagtagctgactacaggtgcatgccacagtgcctggctaatttttgtatttttttatacaggcagggtttcgccctgttgcccaggttggtctcacactcaagcagtccacccactttggcctcccaaagtgctgggattacaggcttgagccaccagctcagcccaaattcgtacatttaattagtatcctaatcttgtttataaagagtataattttagttttgcagtgaggtattaaactttaccatgcgttcagtttgtaattggtaaacaaaacctctaggtgcttttgttaataatgtaagtcagttgaagccatagtcttccagtagtcttcagttgagtgatggaggttttagagtcacaaagtattggcagtgtgcttaggctcattctaaacatataaagtttaatatcaatcagaatgaaaagtagtaagaattgaggtttatagcatatcttcccaattttatagtcacacatagaaatatatgtttttcatatgttttttctacaaccacataatggggctggagacatgagtattctgtatttgttgtcagtataattattaattttaggaaggaacttagacacttaggatgttttcaaataaggctgaaggaaattcctaagaaattgattgtatgaggtatctttaggggatggcatcttttaggtttgaaatattagatatgtctttctttagctatgttgctttatatttaaagtgtttattttactgttaaattccagggggaaatataataaacattaatttttttccatggaaacaaaaaaaatattaagatgagacattttaaaaatatataggttattcaaaagggtaaaaatgtattgccagaacctctgagtaggtacatgaacgtataagttcttgaacaaattgtgaaacaaaggaagtgagcctagcggcaaggaagcggggcgctgtgctccgggggcgcctcccgagggcacttctcctgagtctcagataaagtgaaagttcacatctctgtttcatataacttttcactaaaactttaaacataaaggcagtttctaagtttagacaaagttacagtttataactctaaaggatgctgacagtctgctgtctaaaaaataatttgtttacccagaccagtttcttttctgtgtttttttaaaaacaactttattgagttattgtggacattatatttaaagagaagaaatagataagtgttggcatatattcacctgttaaaccatcaccatgatcaagatgacacccatcatccctgaaggtgtccttgtgaccttttctgatccatctcctctgtccccaccctacccccatctgtctctaggcaaacactgatctgctttctgccactataaaagagtttttatttctagaacattgtattgagggactcctacactgtgcactttggctcctttcactcagtgtattgcttttgaaattcatccatgctgtagtgtgtatcagtagttcattcctttttattgctgagcagtgttccattgtgtaggtgtatcacagctatttatcctcttcattctcctgttcatggacatctgcgtttttccagttttgagctattgagtaaagcttcttttaacatttatgtacaagtcttatatggctatatactttcatttatcttgagtaaatgtataatagtaaaatggctatggcatatgataggtgtatgtttcatttttcaagaaattgcacacagctctttcccaacgtgtttatactgtttcacagttctgcatcttcaccaatgtgtggtatggtcatcttcataattttagccattctaataggtatgtagtggtatctcattacacttttaattggcattaacctaatgactaatgtggcactttattttaatgtgcttatttgtcatcttggtgaagcgtcttttaaagtcttttgcccatttttcattgttatttattttctttttccagattggtttctgatactaaattggcctctagagttgggcagaaagactcatcgctacaggttgtctacatgcctcagtcattgcccttctatgtgtgtagttacttgtaaatagtaatatcagaaaatatgcactttcaaatagaatcacattttatctagcttttagcataaccaaagattacattaataaatgagctaaatattagtcacattttgctacctagagatggctagttaattcattaattaacttaaacagttaataaatacctgttagatggcagagatcagttccctgttctcaaagaaggaaactacagacactgggttctccttgagggtggagggtggaaggagggagaggagcagaaaagatcagtgttgggcactgggtttcatacctgggtgatgaaataatctgtacatcaagccccccatgacatgagtttacctgtgtaacaaaccttcatatgtacctcctaacctaaaataaaggcttttttaaaaaagttccctgttctcaaagagatattttagtgggaagagccaggcagataagcaaatatatgtatatgcaaatgaatgcaataaaatgttctgggcattgtaactgctttatctcagccaggtgtcagtaggtcagtataagcatttcatggccagtggcggatagggagccagtgcttccaggtatgagaagtcaggctctaaggaaagtacaaaaaagaaattttacaatgttggcagcagaggagctgctgagtgaggtggtggccagtgcagtgaggacccagcagatggtcagtgaagttggttgtgatttatctatctcacactttctacctgaaaggatttaggtttggtcatcttttcatcaaatatttgcatctctataagaaaagataacttgtttttaaaagtaagtgagagaattgggaaaggaaaatactgatatgaatgaggtaagtgcatacaagagctgggccactcccagttgtgccctaagtttgctatgaaagcaaggacaaggaggggttgccttatcccagtcatcttaaacccgtccatcaggtcattaaaactgagcacccttaccaagctattctacccaaaaaagagttgaaactgtttttcagctcttttgagagaggtggaaggtgggaagctagctcatagagtccttgaacaccttcctaaggactttagatcttctggaccagagagggagccattggagagttttaagtaggagagtgacatcatgagatttgtgctttagaaagatcactgaacctgcagaattgaagacgaattaaacagaggaggagagagggctggaggcagcaggtacagttggatcagtgcataggtcagactccagcttactagctaagtggcgggggtagacagggaagggtagtgatgattgatagagtaggcagaacttagaaactaactgagctaactaatcatttgatccagcagatatttattgagcacctgctatttgcttggtactgtgctgattgctatgggaagaaaatgttaaaatagagatacacttcccactctcatggagctgagtcttatgaggaatggacataaatctcaaccacagtgatacatgtatccttactaactgggatggtgactgtgtgacagcatcaacaaaggagcccaaacttggcaggagttgtggaaggtatcattgaatctgaagggtgagcaggacccaactaggccagggaacactcctacatagagagggaacagcatctgtaaagagcctgtggccgtatggagtatgacattttccatgaactaaacaaacaggaagctatgaaatagcagggtatgaggtgaggccaaagtgagagatggggattggttcactatgcgaggcatcaaagaggagttgtgctcttttgcctaagagaataagaaggcttttccaaatcagtttgaaataaggccaatttctctcctcctgcaccagccttgtcttactaaatgttggagtagtttaactttggctccctcttctggcgggttgtaggattctgcacttttggagagaaaatacctaagattactgctatttcccaatttatcagtcctgggagaacacatttgagacataattccacttaaatcttctgtgtttcatgagatttaggatttgccatttgttctgagagctcatttagttcaggatgatttagcatgaaaagagatgtggtcaagaaggagttaagggaactgacaagctctacacccagtggactttctttgcctttaatgttttgtccagtgtgttgcctcacttggagagagttatgatcaatgttacatatgagaagattacaggagagccagtaggcattaatgctgtcttgattactcagctttaacatatgctcttagcggcattttctaaattgatcttctaaataagcctgttgtttaaaaagaacttagatgtgcttgcatatatgatacatagtacattttcttacagcaggaatatccaagggccaaaacaaagtaaccttttaatgaaatgattcttactgtttgtagtcattattaaaataattttgctttcttttaacattcatgttatctagtatgtgatgtattgagagtggcatttggtaccttttagagaggtaactgtaatatgctagagtagaaaatacctctgaacggcatttctcattagcaacagacactaagttaatgtagtttgtagttaatgagtctgtgcttgttttgagttgggctccaaatgttgccacggtgatagatcagccagaagcatccactgaacaaacagaaggcaccactttgtatccctccaggactgctgatgagcacagcagatggaccctccgtactcagagctgtcttctgctcgcatctcattgttctaaggcaacttctcgccacaatgtttgctgctgtataggctgcagaagaaattgtaataacaaaaatattccttggaatcactgattatgttggcacaagagaatagttctcttacatagtcacatttgcaaacaatcttatatttgagtaaatttaaaatgttaagaaactctgaatctttgaatatttattctgaaatgactagaattactgcttgatttttgacaatttttttcattgtgtggggtgtccatgcataagagaagttctatgctttatcttacaaaagcttgtttcttaagttctgagatgacatcagtcataggacatatcatctattcaataacgtcctgttgacagaggtggagcatgaatgaggaaaccttgttgtatttatacatcaattgtaaggggcatccaaatttcagaaagaagatgtgttaaaatgtgtgggttaaaaatgtccctcccagttagcatttttacctataaaaagttagttttaaaatatactgctctcatccatttcacacctacttgttattatactttaggctaatggtggcagcccacgggattctaattgaggatccttttaacagtaaatgccattactgggaaacagtggtatacctagctcataccacatactgtgatgttgtctaggtagatggaagatttaaatgtactacttgggccaggcacagtggctcagcctgtaatcccagccactttgggaggccgaggtgggcggatcacctgaggtcaggagttccagaccagcctggccaagatggcagaaccgcatctctactaaaagtacaaaaattagctgggcgtggtggtgggcgcctgtgatcccagctactcgggaggccaaggcaggagaattgctggaacccaggaagcggaggttgcagtaagccgagatcatgccattgcactccagcctgggcaacagagcaagactccatctcaataataaataaataaaactccttgctaaaaaagtctatatgctcttaaccagatttcggctgaagaatatagaaactactctagctgttataagcagaaatgggtttaaaatatggaggactgggtgcgtataaaatcactgaaagggctgaagggggtaaactctaggctgggccttcagaaatgactccccaaagagttccctgaagagctgctacctccaggaataattgagaggccctattggctctcttgacttctagagcacagtgccactgccgcagaccaggggtcaggaagcggcactaacactgtctctctcagccacaaaaggagcgattgggaatgtggcccctgcacagaaactgccaccatctccagtactgtgcttacaggcacccacagccagtacctgccaggtcacatgcactcacatgtaactgggggaaccagatccctagcctcagctctccttgcacggaggctgcataagctgtgtgccaggcttgtcagtcctgcaccaggtgtgcctgtggtggtgggtgggagagaccattttaactacttgctttgtaaacatttaaaataatgggatggctgttcattaacattcatctagcgcctaacactttccaaactgttggagatatgggaaccaaattaaggggggtggtttagaaccagagtaagatctaatcctccattcctgagtacagctgtcattacctcttctaaattgctgcagtctctgcctgccttcccttctttaggtcattctctgtggttcctcctttaacatgattatttaacttctgtggcttccattgcttctgagaggaggaggattattatactataaacgcttactgtgtactaagtgccagtcactgttctaaaccattctttacgtagattagcaatcaatcctcaaggaactctctcagtaagggattcttagctcccttttatccccccgcccttgcccacatgttatggatggcatgactgaaggatggagaagctaagtaatttatccaggatccccagcaaagaagtggcagagctgaagtttcaaccccaaggccatacttgtagctactgcactccctctcaggagaagtgtatggaactgataaacccccagttctgaatggtgatgatctttgctgggggaaggtggagtatacagtcagggagggaaagataggtggggctttggtggaatggggacattttatttcttaagctggagattggctccatggagatttgttgattatttggtctttatgcctttttaaaaatgtcttaaatatttctaaataaatttttaaagaaaagactgtgttggtagttatgacttgggtgattgaataagatagaagcacctcagcgtgctcccactcctgctctcctgctctgttcagaccagggtgaggaatgtaaggtggatcatagggaacttcttttcccatgttgcattcctgctcaggtggcggagctgaacaaggagggcaccgctgcctcctctcccaaccacatggctctagagtctgcacagggtctcagagacctcaacagcttgaagtgcttgttgagcttaggtaacccatgactgcacagctgttcagctcaccatgggttaacaattgtagcaacctgtctctagagtttctctctgaaactggaggctccaggcttctcctagtgtggcagccaggcaggaacactgaggagtatccatccatggaaccacccagtgctctcccagctataggtcaagtgatacaatccaaaatccttccagggtctctgcctacctctccagcctcctgtgaaacaaccctgctaggcttcagcccccgaaggcgagaagctcttttccatttcagggccttcccatgcactgtctaggctggtgggagtgagtttgtaggtacgaggtgcgcacacatacacacagacatactctacctcgctaaccctgacatactttttcaggctctgcttaattgtcactttctcaaaggagctttctgaatccctaaattaggttatcttgtcccactgttccttttatcatgcttacaacaatgtgtaattttctatttgtgaaatcattttaaagataatgtctcttctactatatgataaactataaagacaggaaccatatgtgtgtatatatatggtttttggtttttggtttttgttttgtttttttggtttttttgagatggagtcttgctctgtcgccaggctggagtgcagtggcgcagtctcggctcactgcaacctccacctcccgggctcaagtgattcttctgccttagcctccagagtagctgggactacaggtgtgcatcaccacgcccgtctaacttttgtatttttttgagtggagatggggtttcaccatattggccaggctggtctcgaactcctgacctcgtgatccgccccgcctcggcctcccaaagtgctgggattataggcgtgagccaccatgcccagccggaaccatgtttttttatataatactcagtattcacagtgcctggcacagaataggaacccattaaatattttctaaataaggagaggataggtggggatattgacatgtttgggggggtggagcaaatggtaggcagattgcatgggaaaacaacgagtttgagcccttatttaccgtgctttcctttttttgcagcactttacacctggtgaaccatgtatcttacttacacatcaagtttattattgatcctttttctctactaagatgtgagctccacagggccagggatctctcttttgttccttgatacagccccagcctagaggaggctgagctgtagaaaacctctgtatttattgaatgagtgagtactgtctctataaactagaaatccaggccatagattgagagaagctggatggcatcaggattccagagtgcaggaaaagttttaagcagttacaagaggggggttttggcagtccatgttaggttagtaagaggaattcttggtggcagcaggtgcttatgctagtgttagtaggtaacagagctcattgctgtttctgagactacatgtggcagtgtcaggcggtctggaaatgactgaaggttgggatgatacagaagtatggatagcaagcatagtgaaaggaaggaaggtcgggggcctcggctgttacagatgacgatattgaagtgactgagcatgatgagactcaagccaactaaaatggctaggaaagaagcagagagaatggggttgcagccaggacttgaaaaggctcagaccctagcaagggtagactggaggctaacgaggctgggtcagcaaggcaagttccttctgtcttggtatcttagagatgacaatgtagtagaaaagtctgaaaaggagctctttcaaaatcaagttctccaaagtctgaagggacagcagcctgaactttgtgtccatactgtagcctgtcattttagaaaaagcaaaatgtgggaatctctctatttggccctgttatgacaacactacctgaaaattttagctgaaagcagaaaatccttggaaagaaaattgttttaaaagactgttgctttcttatataaagagttaccatctaccttttcaccagcagatgtcaccctcatttaaaaaacaaaaggcaaaagcttactaggcaaagagtaaccaaaatttccatcttgctgaaagttttttaaaattatatatgtagttattaaatggttgctatcttaatatttcttaaataaaacaaatgatttgttgaaaaatcataaagaaactaaagttcccattgccttcctgtattctcctgctgcatgaaaatgctgatatgcaaaagggtaggttcccatgtgagtccttatctgtgaggtatggccctagagtcaggtctttttgaagaaggggaatgtcaagattgctttgatgccctggttttttagacagtaatagacccataagtgaggatctgaaaagagtttatggctagacaaaaaaagaaaatgcccatttaatttatctgtgttacaagaatagatccagattttgagatcttccacttatcccttcagattattaagtggctgcttgattcaaagatccaaaaattactggcttaagtcagaaggtttatcactgcataatataaaagagacccagaggtgtacagctcaactgggtcagaattccgcattcctctgtctgttgctttgctgagtgaggcttctcttcccttttcttagggtccaggatgacctgtagactaccagccatagcattagcattgcaagctggaaatatcactgtgagaacaagtacgtgggtaaactgagtgtgccatgcttgcattatactccgggacccttggtctttttattaattgaatacatgctttgtggcatttttttctgtttgtaaaataatgtgctagtactttagtgtagagtaaatagttgtaagggaaattctcccacctgaaaaagcttgtgatctgtcacaacttgtagtttctcaatctctgtttcactttcagtctttatgaaaacaggtaattatttagcggtttctgagaaactagcttaaactttatcctttccaataatacaatgccatttctagaccagcaccattcaaaagaaataatggaagccacaaatgtgagccacatgaatcattttaaataggctagttgcatcatctaaaaagtaacaggcggaattacttttaataatgtttaacttgatatatccaaaatatcgccatttcaatgtgaaagcaacagaaaaattgttaatgaggtatttctcttttttttggtgctaagtctttagaatccagtatatgttttaatactaagtacatctcaatttagacctcaaggctcaatagccacacttggccagtggctgctgtactgggcagcacatggtcatccttcccctctacacttgtctgagatttccagtcaattgcacaagctttaaatactctgtgtgtcttctttatttccccagttcattgttgattcacttaagtgagaaacctaagtgctccagtgccttcctacggcaaccaacacagtcctggactcagaccaggaaattcttgtttgacttttggatgtgtttagtaggaaagaaagcttccttcaggcagcactgtccagtaggtagctgaagaaggaggctggacttggagctcgagggcaacactgggacagtactcaggcatcagtagcacagaaatgatggtcagaatggtgagcatggacaacctctccagagagtccagggctggagaatgagtacaaagacttgaagtccattagcagtgagagggccagcagagcacaaaggcgtctctgaggggcacaggaggggcgtgggccacgcattcagacaagcctgatgtgcttgtgctcgttcactggtcctgttgtgctcatagctcaaggctgttataaagtaaaagcacctgcgtttctaagagagtgatttcatttctccatacttaatatgttcctgtttcttcttgataaatagcatcattttaacttttcattcagtaatcataaaaaagattatggagaggagacatggaataggttatttatttttttatttttattttcttgagatagagtctcactctgtcacccaggctggagtgcgatggcgcagtctcggctcactgcaacctctgcctccctggctcaagtcattattctgcctcagcctcccaagtagctggaattacaggggtatgccaccatgcccagctaattttggtatttttagtagagatggggtttcaccatgttggccaagctggtcttgaactcctgacttcaggtgatctgcctgcctcggcctcccaaagtgctgggattaaaggtgtgagccaccatgcctggtctatttatttataattttttaattaaaataaaacaatacctacataagactttgggatatattaccaggatttttcctctggaaggtttctatgtctgatagtctaatattacaagtagttggaactctattagtatctggctcttttcctgtaggtctagcctttgggccaaaaagatgcccagaggcagtgagactctcaccaaggtcattcccagaattttagactttgctggccatatatggtctctgtcatatatttgtctttgagtttttcccccatcctttaaaaatgtaaggggcattcttacttcacctgccagtcctgccctactcacataacagttattcaaggtggaaagggaagactggttaggaatactttgactctttaaaaatgagtctgtcttagatataagattgactacacataatgcatcaggcaggtagcacacaggaaaccatattccatatccaaatgtcttagaatttggtggtttatattgaaaaatggactgataacattcatctatgatttgcttacttcttcctttctgtagcatgaactccttttcctctgaaggttttgaagaaaaacaaccctgaatttgtccttcagtcatttaagaaagattaacagcagcatggtggaaaagcatggtcagagatgtgagttctagtcccagtggtagctgggtcagtcatctcagccatatcatctcggttgcctgagtctgtgcagatgagggtgggactggatgatttctaaggttcctgtcagctcaaattctttgcttctgagtccttgcctaattgtttccatcaggttttgagttctggtgcattttcttcatttcgagtcttttaaaaggcaaaatgacaagtagaagtacaagtgtagttggcactccttatctgtggcttctgcatccatggatttaactaactgtcaatcaaaaatatttgaaatataaatggacagttgcatctgtactgatgcagtgcatgtactgtacatgtgcagacctttttttcttattattccataaacaatacagtataacagctatttatatagcatgtaaattacattaggtattataagtaatctagagattatttaaatatataggagagctgggcatggtggtatgcacctattgtcccagctatttgggaggctgaggtgggaggaacacttaagctcaggaattcaagtccagcccaccctgggcaacacagtgagactccgtctctaaaaaaaaaattaaaaattaacaacataacgtatgcgggaggatatgcgtaggttatacgcaaataataacctgttttataacagggacttgagcatctgtggattttggcatccaagggggtttctggaaccagtccctcttggatactgaaggatgactgtactttgacttttatagtagctagccatccagtgtcagttatttacaaaagagaaactgggtttttcatcacaaaaatttctgtagcttgctaatagttctctttttttattccttccttctcctgctcctcctcctcctcctcttctgctgctactgcttttgaattttgtagtaaaagaaccaatattcctagcttcccaagaagcacttgttgagtctagaataaaacttttgagctgggcacagtggctcatgcctgtaatcccagcacttgagaggctgaggtggatagactgcttgagtccaggggttcaagaccagcctgggaaacatgtcaaaaacccatctctactaaagatacaaaaaattagctgggcatggtgatacacatctgtcgtcctagccacttgggaggctgaggtgggaggatcacctgagcccggaaagccaaggctacagtgagctgtgatcatgccactacacttcagcttgggcaacggaagtgagaccctgtctcaaaaaacaaacaaaaaagcctggccgggcactgtggctcatgcctgtaatcccagcactttgaaaggccagggtgggtggatcacctatggtcagaagttcaagaccagcctggccgacatggtgaaaccccatctctactaaaaatacaaaaattagccaggcatggtggcgggcacctgtaatcccagctacttgggaggctgaggcaggagaatcacttgaacccaggaggcagagattgtgccattgcactccagcctgagcatcaagagcaaaaaaaacaccgtctcaaaaaaaagcaaaaacaaaaaaaccttttgaggcagatacattaaagtgtgtgaaaaaataattgttagtatgctaattgtaattttaaaacacattgagtggttctaagtttaccagacaagtgtctatgtattgtgctctcagttttatttggaaagtttgctattgtgaaagagacagcaagttttcttctctgttgtgggttgtatttccattttttattaataggctgtattatttagagcagttttttttggtttttttgtttgtttgtttgtttttttggagatggagtctctctctgtctcccaggctggagtgcagtggcccgatcttggctcactgcaagcttcgcctcccaggttcacgccattctcctgcctcagtcccccaagtagctgggactacaggtacctgccaccacgcccggctaattttttgtattttagtagagacggggtttcaccatgttagccaggatggtctcaatctcctgaccttgtgatctgcccactttggcctcccaaagtgctgggattacaggcgtgagccaccgcgcctggcctatttagagcagttttaagtttacaaaacaatcgagctgaaagtataaagttcccatgtattccctctcctcaccaccactagtttcccatatttgtgtggaacatttgatacaactgatgttctagtattgatacttttttttttttaggacagagtcttgctctgttgcccaggctggagtgcaatggtgcgatctcagctcactgcagcctctgcctccaggttcaagcaactctcctgcctcagcctcccgagtagctgggattacaggtgtgcgccatgacgcccagctaatttttgtatttttaatagagacggggtttcaccatgttagccagtgtgatctcaaactcctgacaggtgatccacccaccgcagcctcccgaagtgctgggattacaggcatgagtcaccgcgcccggccaatacattattattaactaaatgccacagtttacattagggttcactctttgtgttatatatctatgggttttgacatgcacagtattgtgtatctgtcatagcagtttccctgccctaaaaatcccctgtgctccgcatagtcatcccccactcccctggcaaccgctgatcttttcaccatccctgtagttttgccttctccaaaatgtcacgtagttggaatcagacagtatctacatactgtggattttctacatactgtactttcctgattggcttctttcacttaacagtatgcatttatagttcctctatgttttcatgacttgataactaatttttttaaatcacgtaatgttccattgtctgaatgcaccagtttatccattcacgtactgaaaaacatcttggttgcttccagtttttgacaattatgaataaagctgctataaacatttgtgtgcaggtttttgtatgaacgtaaagttttcaactcatttgggtaaatacctattagcttttctgttattataattagctgaaggtcattatcaggaaaatatatatatatttatatttaagaatcaacttcaacttgtaacaaataggttctgcacctttctttaaaagatataatggatgttcattctgtataaaggtaaagaactttaaaatcttaagtaatcacaaaaaagtatttcatgtctatatcaaggccagggaaataggagcagagacaggctggacatagggaagaggaaatccgtggactctggaatgctagccatcacagaattaaaactgcatgtcatgttctctgggcttcacttcaaccataggctttcagaattagaaggagccttagagtgtcagctagtctaaacctttcatttccagatgagaaaactgaggtctagggatatgaaaattacttaatccagatcatatatattattagtggaagtgaatccaagtttttgaggtctctagccttagtatttttttatttcatcaactaatttttttacatgatgttgctgtctctgcattttttaaactttatatgtttgagaaaaacaatcactccttcaacatttatttagcactcactgttgtcaaacactatgctgccataatttacagcctagagaagaagacagtcattttaaaaaataacatacacaatgctgagtgctgtgccaaataccgggtactgtggatgttcagtcagaagcacctagactggcttaggtgaggaggtgacatttagtctgatatttaaagaatagctgggaattaccatgttttttgactctgacattatcaattgcattatgcactattttatgtaccactaagaaaaaaattgccagttaaactgatatattcattgtcagttataatatgcatcccagtttcagaaatgttgaaatatttggaaatgtgccctagaattgatgaaatgtggtggttagatgaagaagcaagcagctcacaggggagtttagcacttgctgaacctcaaagctaagtctggggaactgggagtcttactgctcaggaccacgtggaccttgcagagagtttggattttattctgagagcgttacaagacctcagagttttaaaccagggaggagatctgcatttcagaaggatcacactggctgcagtatagatgatggattagagagagtctcttacagtactccagctaagagatgagggtgcccaggttccaatggtgaccgttggaatgaaaatagatgggtgaaattgagggatatttgagggtggagggcatgtaggagctattaatagaaatgacaaggtttggtgattgattagatgtaggagagattgaaatactcagaagggcgaggcgagaaagctgatgagtatatgggacatgttgattttgaagtgtatcaagtataaaagagtggacaacaaagccataaaagaacaggaaacctgccaagggggatgggaaatagtggcatagagaagaaggcaggagtggccgtcgctgataaagacaacctgaggggtcttttggtccaaagactgaggggtcaaaagataacagggccttggattttagcagcaagaaagaaattatggccttggctagtcagtttccatgaaggtttggcaggaggagaggagagagtgggaggagctggaggagaatgtggagtccaggagaggtgattgttgccatttgtgaagagattaaatatttgaacatgttcaagtgatgatgagaaggagctaattacagtagccagacagtccctgggcccgttagaggttggaaatgcaatgtctttcactctgcacacaaacaccgcaaccctcttcttttttatattcagttccatcatatggaaactctggctagaaaaaaaacagagaaatacttgtaaagcaaggaattgatccaagacccaatcttatgttttgggccttcatatctactttggagagagttgtgagttgaagacccaggacacgcaaagtccctaagataggatccagaggtttggagggtgcccccttgcattgcctctctgaccccattgattgtgagacatatcggtattgcacataccattaagaaaggaaaatatgctgcctgtgcactgacatggcatcataagacacatcccaatgtaagtgatggtaacctgtgaagggatgtgcgtctttgagttgatggaatacagtattagccttagataggaataacagatgtgggacaaagaacagggtgacactcatatatctgtagtgacagaaacttggaggttttttttttttttttttgagatggagtctcgcccaggctggagtgcagtggtgcgatctccgctcattgcaagctccacctcccgggttcacgccattctcctgcctcagcctcccgagtagctgggactgcaggcgcccgccaccatgcccggctaatttttttttgtatttttagtagagacagggtttcaccgtgttagtcaggatggtctcgatctgaccttgtgatctgcccgcctcggcctcccaaagtgctgggattacaggcgtgagccatcgccccccgctgaaacttggagtttttacttgatggcttttatttcttctgcagagtagtcaagttcattttctggggatggggagaagtgggaacaaggaggtagagggattaggagctcaggagtggaagatctctaaatgaattgttgacaccactggaacaaggcagacccaggaagttgcaggattgacaggaagcagtgagggcgttctgaggccaggaccatgcattcgtagcagtaccaaactgcatgtcacatgattttcttgagagatacttagcaacctgagtcaggaagtagggagagtagacagtgggttcatccaggactaaggacttgccaggcactagtgacagatagacagtgaggcaaagacctggaggatactggtagtgtggacaatgtagcgttcacatggtagatggccaagtccatgttgagagacaaaaactgcaggtagactggagctgacaatgtaaagggaaacagtaccgtatcatgaaccaccccccaatgttgacttaaaatattttttaatgtttcttctacataaaaggtatgtacagaactaggcataaactcattttgtacatagctgtttctcagctatcaaaccagtgatgtttacaaattgagtagaaaaccaaaaatgttttcaaataacaaaatagatgtaatgtcctggataatgatgttttgtgtacaagatgaggtgggactgactattgaggcgccgactcttgcactttacatgtcggcgtgcagaattactactcgaatcactgtttgcattcggcatgctaattagtaaaccctattattaggttatcacccaactcttctgctccttttttaaaatttaaattactatgagatctttgtttatgcaacttactctaatatgattttagaccttcacttaatgcaaattcattattcgcacagtaggcccaactgcattctttcccagtaaatctggcagagtgtggcagtgctacagacgccaaaccacagttgctgacactaaaattcagtagtacgatcataccttgcttgacagagagatacgttctgaaaaatgcaccgttaggctgttttgtcattgtgcaaacccagatggtacaggttgctactcacctatgccatgtgatagaaccttttgctcctaggctgcaagcctctacagcatgttactatactgaatactgtaggcagttgcaacacaatggtaagtatttatgttatctaaacataggaaagggacaagaaaaatacgctataaagaatttttaaaaggtacacctgtatagggcacttaactatgaatggagcttgcaggactggaagttgctctgaggagtcagtgagtggtgagtgaatgtgaaggcctaggacatgactatacacttaggccacactaaacttacttaaaaaaattttttttcagtaataaagctttttaatttttttaagagttttcactctttcataataacacttagcttaaaagacacattgcacagctgtacaaaaaatatttttctttctttatatccttattctgtaagctcttttctgtgtttaattttttttttaacttttaaacttattaaaaacctagacacacacacacacacacacacacacacataagccaaggcctacacgaggtcaggatcatcagtatcactatcttccacctccacatcttgtcccactggaagataacatgcatggaggtttcatctcctgtgataacaatgacttctggatatctcctgaaggacctgccttaggctgttttacagttaactgttgtttttggcttttttttatgtagaagcaatacactctaaaataatgataaaaagcatagtaaatacataaaccagtaatatagttattatgaaccattatgtactactgtacataattactactgtacataatgtatgtgctagacttttttttttgtttttggagacggagtctcgctctgtcacccagcctggagtgcagtggcacagtctcggctcactgcaacctccacctcccgggttcaagcaattctcctgcctcagcctcctgaatagctgggattacccgtacctgccaccacacctggcttgtgtgtgtgcgtgtgtgtgtgtgtgtgtagtagagacagggtttcaccattttggccaggctggtctcgaactcttgacctcaggtgatccgcccaccgtggcctccctagactttttatgtgactggcaggatggtaggtttgttaccaccagcatcaccacaaacacgtgagtaatgtgttgtgacattgcaacggctgtgtcaccagacgataggaatttttcaattccattataatcttacggaaccactgtcatatatgagtcagttgttgactcaaacgtcattatttagctttaattattcagataacccagaatgcaccaatatatgttttatacattatcatcagaattaaaacaaaaatacatataaattcatggacacctaaagattccttcgttttataaatattgaacaagagcagtggttctcatagagaggtgctggaaccagcagcatcaacattgtcccagtaattgttagaaatgcaaattccggccgggcatggtggctcacacccgtaatcccagcactttaggaggctgaggcgagcggatcacttgaggtcaggagttcgagaccagcctggccaacatggtgaaaccccatctctactaaaaatataaaaagtatctgggcttggtggcctgcgcctgtaatcccagctactctggaggctgaggcaggaagatcacttgaatccgggaggtggaggttgcagtgagctaagatggtgccatactgccctccagcctgggtgacagagtgagacactgtctcacacttaaaaaaaaaaagaaagaaagaaatgcatattcccagtttctccttgctttttgacactgaatcagaaagtctggaggttggcaccaggtgtctgggctctgataagccctctaggtgattgtgatgcaaaccaagggtgagaactgctgctccagtcttaatgtatcaccttgattttacagatgaggaatccaaggcccaggaatagctggctcagactctcaagattagtttgtgtgtagcaaaactaggtctcaaacttggaactctagactttagtccagttctgtttccaaagcactacattgtcattttttctcagtttttggttatggtttccttggtttgggttgggttttaaaggggtctagctaaagttttgggttcttttgcctttcattcattttagtgccagaacctactaagacctgttcaagccagccccaacctgccggtaccagtaccagtacttccaccagcactatctcaagcagcaacaatggcaaacgtgcatctgccagtggccagcagccagctgcatcccgttacctgcctcgtgaggtgcctccacgcttccgccagcaagaacagaagcagctattaaagagaggccagccattgcctacggggactctaaccagtgtgagcccaacccagggtgctgggcctgcaggggtaagcccacctcccctacctggagccggaacacagcatcatcccagtaagctccaaccaggtaaaaaccacataggatgagacattgttttgatctgaaaactttgctattttcaactttgctgctgagcaatagaaatagacatattttggtccatactcacaacatacacagagacagacaaattcatttcattttaagtgggttttaaaatttaattgtgttttccctctatttatttacattattggtcatgagtttgcagatggcatgagctacttcagctgagcttatttttcatcagaaactaaaggtctgtacattggtccatacgaacccatcaaggcagttactttagaacccagaagtgaaaacttttcagtaaaacccttttctctcaatttcctagtctgtcttatgagtgcacacaagcattttttgcagggaggtacagatccttccactaggcgtttctaactgtaacttagtcatacacattgagccaagcctatctgatacctcctcatcctaagccctgcttcttgttgcttccttgcctgtaactagttgttagctttcttttggctcctaagaaaaatcaccacttgtttatttgctttccagctgccaaaatgcagatgtctctcatttcctgtcagcttcttttccaatctccttgacttgatggatttgtacttttgaaaaattcatgtactgtagttttaaggaatttttggaagagaacaaagtatttgtggtcaactgccatgttctctgttagattcttcaatttttcggtttcaagtaacaactaataattggtgctgtttctggaatggaaacttatctgctcatagttgtgaaattaaggtctgtaattagatgtgcaaggaggcttcttagattggaatttaaaagaaacatggcacaagtcatattcttgttttctttcatgtgctgctttttaatatgggtaataattctagcatgacgtagaagtatttatagcaatgtttttcaaaactgtgactttgtagtatagtcagaactaatatttttagacaactttaccaagtctcttcaaatagtcttggctttcgtctgctaaccacttggtagaggggatgtaggtcaatgattgtcaccaaaaagcaaggcagaaaagataaaatatattcactgaccaagaatatagtctcatctatttagttgccagcagtttacaatcaaacatgctactttcccaatatggtccttgggaaaatcttaacagagacaaggattctatagttagacctaaatagcttggtgttttaatttaagggtcttattttgaaaaactgaataagaaatgtaacagccctgcctgttctggttgtatctggttgtgatgtgattggttgacagtattgcatcagttttctcatcaaatgctgctggtgcagaatgttactggtatcttcttagataagtagaaaataagcaattaagtcaataaaatcttgctatgatataatattccctcattaaatatttatctctgtaaatataacattatctaagaaaatactcctagttcatagtccttctaaaatatatattgtaggctgggcacagtggctcacgcctgtaatcccagcactttgggaagccaaggtgggcggatcacctgaggtcgagagttcgagaccagcctgaccaacatggagaaacccagtctgtactaaaaatacaaaattagctgggcatgttggcacatgcctgtaatcccagctactcgggaggctgaggcaggagaatcgcttgaacctgggacgtggaggttgcggcgagccgagatcacgccattgcactccagcctgggtgacaagagtgaaactccgtttcaaaaaaaaaaaggtgtgtgagtatatatataaatatacatataaacacacacacatattgaagaacataaatcattttatggattgaaaacatctcaaaaaattgatcaatctatgtagtgagcataaaataagaaattcattcttgactcccaaacaaaaatcttcattttataccaatttcatctcttcctcagtagtctctggtatcacagccagatgcatctttctaactcaccacccttcactgacgaggggtcccctcacaaacctgccgtggtcacctagttactaatgcacaaactctccgtttttctctctggctgtgaaggcccttcatagccgagtctccccaacattttccccgcctactctccatggcctacttttttcttttcttttgagactgagtttctctcttgttgcccaggctgaaatgcgatggcacagttttggctcaccacaacctctgcctcccaggttcaagtgattctcctgcctgcctcagcctcctgagtagctgggattacaggcgaccaccaccatgcctgactaattttgtatttttagtagagaaggcatttcaccatgttggtcaggatggtctcaaactcctgacctcaggtgatccgcctgcctcagcctcccaaagtgctgtgattccaggcgtgagccaccaccccccagcctccatggcctactttctattatgattgggattgctttcttactgtctcacaagtgtgccatgctcactgtcaagtccctcccatgcacacatgcttaattgctgcccccccaacccccactttacttccagttcattgtccccccgcacccgtgaggcttccccaagcagctctgtctccattctgttctcacaggtgtaatatgcccactttgtaacataacacctttgcacttactgtatactgtatatcctatattttttgctgattaggtcataagagtcttgcctttaaactaagttggaaatatcctatgaagaaaatgtttgaggtcgggcgtggtggctgatgcctgtaatcccagcactttgaagccctgggcgggtgaattgcttgagctcaggagttcgaggccagcctgggtgacacagcaaaaccccctttctgcaaaaagtacaaaaattagccagacatggtggcatgtgcctgtggtcccagctactcaagaggctgaggtgggacaatcgcttgagtctgggaggtggaggatgcagtgagccaagatcgagtcactgcattccagcctgggcaacaggaaaaaataaataacgtctctgagctttctatgactaagcagaatgggaaaatctctgaaccataggtgaggacttggaaactagaacttgttatgccaccaactagtccttccatttctcatctaaaatgagaggtttgaacctctcatgatctctaaggtcctttcccttaaatttctgactcagacaccattccaatgactttgtttgattttgtcagtggaaggactttcaggaacactgtcccatgttgttacggtgttggcacagggattgtaggtgagcatcagcaagcatggaggcagtatggcaaagtggtcaagagacaggcccaatccactttccagacccaccacctcctgtgtgaccttgaccaaatcaccttcactccctgtacttttgactcatctttgaaatgaagagattcctaattttgaagatgagctatttatttcatatgcagcacaaggtcttgcttatagtaggtgttgagtaatgcaggtgatagttgttagtgtgagactggtgagactttgaaatatacaacaaatatgtacccatctttgaaacaccattgtgaagcagagtgttcacaaatcccagctacctgacaggctgagggagaaggatcgcttgagcccaggaattcaagaccagcatggacaacacagcaagacctgtttcaaaaaaatagtcaaaatttttgactgactaaattctaaaacagtgcagtaaagctttctcatcactctgtgatttgtgtatattttgaagtttcacttgtccttcctagagttctctttttcatattatagttgtttaatgaattcacatccaggtgaaattctattggtgtattcccgaggagtaaccagatttctggtcgcagtgaaagtatttttagatacagtttgaaataaaagctcttatcaactttcttaaaagtaatacatagattttcattgtactttaatctgtcactttaatgtggaagtgactcctacggtcacttctacattaaaacaaaaaaacagagttttattcatgattacatttctctaacttgtaaggttcagttaaaaagaagtacaaatgctgggtccgtagaactaagactgaattaaccaagcagggggccgctgagggaggcgtccttaggaatttagcagtacaccatttctgatgaagagcaaagtgaagcttggagttctttcagcttcgcacacgaatttctgtgtttttcccaggtgtcttagtacgtaaactctttgtgccctccccccaggttttagtgtgcttagcgaaaactaaagaaagtgaagtattcgtggaaggaattgacggagtttgagtcacctttgtcatagttttaaaaagctgcacggtggagatttgtgggcatccttgtttccccataactgagtatttgaccagttgcctgctgctttcccatggaagtaagtgttatagtcctgtactgtgctaatggaaaacttacgtgtccattccagtaaacagagaggatttacagataaaattaaacaatagaggagcagaaatgggaaagtttttaaagagttaaaagtggaatttgtagcgtttttagctgtgtaagaatagataaaatgtatatttatatactgttacagtacaaggcaacgggcgaaattagagaagagacttacataggccgggcgcgttggctcacacctgtaatcccagcagtttgagaggccgaggcaggtggatcacctgaggtcaggagtttaagaccagcctggccaacatagcgaaaccccatctctactaaaaatacaaaaattagctgggtgtgatggtaggcgcctgtaaccccagctactcgggaggctgaggcaagagaatcacttgaatccaggaggcagaggttgcagtgagctgagatcacaccactgcactccagcctgggtgacagagcaagattccattaaaaaaaaaaaagaaagaaagaaagaatggaaagagacttagtctgacagttatttatttcattattctttttctttatatagaatatgcttcctaacgagatgtaaatagtagattaatctgactcttaaaacattttgtcataattcaccttttgatttacattaatctgcaagcttgcttctatagaaaattgcaaccacacattttgccatttcttagacaaactagtgtactggcttcacactttttcactctttttccttttcttcctatatgagaatgttcaggcagcagtgccacactcggcttgcacagctctgagaagggaagaagatgctagcctttcagaacggtggttttgtcatgtgtgtcttcatttgttcattgagcagaacatttgttgaatgcctaccaaacatcacataccctgcactggggatggacaattcatgagtgaagtgttttggaataaccaataagtaagtcagccacttcaaggtattgtaacagagataagcatagagtgccacatgggaaggacaactaacccagactacggataggggactgcaaggaagcctttctggtggaggtgatatgagctgagtttcaagttagctgtgctgggcaaagaaggtgaaagggcgtcgcagatggagtgacctgcatgcatgaaaagcgcagacccgcagttgtaaagcctctcagtaagcgctgcaggctcattgtggcggggggcagtgggaagatgtaaggctacagaagttggctgttggtattactaagtaatagtaataaaccagcataaaagcttcttttggtaatagagccaaattaaattcagatttaaagctcttcctccaagttgcttttggaacttgatagactaattccaaacttcatctagaagagcgaatgtacgtgaatagaagagccaagagactgaaaaagcataatgagctatcactttgagctgtgatcctctagtaattttaacagcgtgtttctagggcaggagtaaacacagatccaggaactatgatataaagagagcagggggaaaaacagatgtatacacggagagttgcagatcactgagaaaatagtggttcagatcaatatcgagtgctagaaagccatatgcaagacaaatataagaactacagaaagatgacgtaagagagtattttctaaatcttgggataaaattttaatcataagccatgaaaagaaagactgacaagtttgagtgtataaaaatttaaaagttttgtacatgaatatgaataaaatctgagaggacatgtttacagtgtaaatagcaaaagataaatatctcaaaaataccaagtgttccgacaaatcaaaagaaaaacagtcccatagaagaatgggcaaagaatgtgaacgggaagatcatagaactaccacaaatgggtcctaagtatgttgaaagtattcccttgtggctgggtgcggtggctcacgcatgtaatcccagcactttgggaggccgaggcaggtggatcacgagttcaggagattgagaccatcctggctaacacggtgaaaccccatctctactaaaaaaaaaaatacaaaaaattagccgggcgtggtggcgggcgcctgtagtcccagctactcgggaggctgaggcaggagaatgccgtgaacccgggaggcggagcttgcagtgagctgagatggtgccactgcactccagcctgggcgacagagcgagactccgtgtcaaaaaaaaaaaaaaaaaaaagtatttccttgtaatcagggaaaagataaatggaaacagcattgatagatcacttttcacttaccaaattgtcaaaactttaaatcttgttaatattcctctattgtaataacacagtactatggattgagtgcttatcatttgcaagatccaattgctttacacatattaactcatttaatcttctcaagaccctgtaatcaccgcaggcgaccagcgagagtgtgggaaaaggcgacgctggtgtgctgttggtcggaatgtaaggaggcatgtggcaggatttatcaaaatgttgggtaatatgacgtagtacatcctgcagacacctagagcacagctctttactgacgactgaatgctctgcatttgtcctctgcccagtggcatgaattaataacaggcaagttggaacgtgtcgagaggcagtagggacaaaaacagagttgactgtattcgttacagaacaggcacaggtgtagatagcattagtcttccagtgaccagcaatctcactttatcctgtgatgataaagagcagcctgtgtttgagaaccagttgaacttttgctaggctgcaggtccccacagaacagcaatttcaaatcttgccccccccccccactccctacctcttaccaggtcagccatcccctctgttcttggtgtcaccttcttgccgtcacccacgttggcctgggcattgggcagaagcttcattggttttgtagcgttattgatgtcaacaagtatcccattttagaaggtaaccaagacttctaatacttgcatgcaaaaataagtcctagatgcttttaatattcgataatgctgatgttgaagtgaaattcagtcaagtgaaaccaattttgtaatgggctgacaattctaaatggagctttccagcgtccagctgaccctcctgccagtggttaatgctgtggctgttgtcaggcagcatcctgtggctgccatccctcgtgggaaacacaggcttgcacacaagggcatccagagcagacagggcaataaaggcctagaaatgcccactaaggactgggagaacaacagaggggagcctacaacaagcccgagaggaggagggcctgtgggcatttcagctgtcaaagggctgtcctgagagcccgctgcccccaggcagccccagaggacagaggtggaacaagagtggcggaaatgtagggtggtaggcagggttttcagatttctggaagaacttttattccttcccccttcactggcagtagccaaggagagatagtcagttattgccaatggtggaagggcttctgcaagacaggtaggccagggtgcctcccagccctggttccaggttctctttaggtaaagactgttatcagcaaatgaaacattggccttctcataaaataatacaggggaaactagatttgtaaattcatgtattgatttggatgggagtatatttagccaaatagcaacagatcttaactgggaagatgagtattagtacgtacagtgatttccagagattccaaagaatgccacctgatcatgtcaggttcagtgcagattatgttttgcaagtctgcaggatagctccagcttgaaacacttgagagcttttatctttaaaaaataataataataataagttcttgtgccaaaggcagaacaatgtattgttttggtggctgctttgtacatttataaacagaggctttgattaatatacggcagtgtttgctacttagatcttttttagatagaggcaggaaagtaattaagaagctggacacttgccagtttacatatggggctcatttagaatattacagctagtgttggcatgccaaatgtttaggagttgtttagaaaaagggagaaagaaggagcggaaaacaaaggcaggatgagagagccgcagtttattcgcctgcagccaataggcaaaatgccgttattcttttggctgactttcaaaaacacagaagaaaagtggctgtgatgctaattgtaactgggtcctgaagtgaaaatgtttgtgacaatcgaaagaatttaaagaggaaggaagatcggtttagtgtcagctgcaattagataatcaaagctgtaaaatcccatccgtccatgcctccgcccctagttgaaggggatgagtcgggtgcctcctggagtagaaagggcattgcccagccctgcccggcttgcggccgcgggcgcccgcgggtggcccggacgcagactggccccgggagcttcctggcagctccctggcagctctacaggaggcggctctcgctgtacccagccgacatgttgtagcgagaggccaggcgagcctcgatgcaggcgtagaggcagctgtgcacgcgaggtggcgtctcctaggagggttgggcggcaccgtctgcaggtatttcctcacccgtcagcccctcgtagagcaggagaaacggaacaaacacggaacaaatagtggctgcttctcgccagtccgtttgtgacataacattccagcgtgtgagtggtagcccggcgtccctaagctcttggctgcaattcagattggataaaatggcgtcttggaaaagagctgcttgctaaagatctgccgcacggagcagagacttacccatggctttccctactgtggtttctctctgctgggctggcacgggcaggccttcccaaattaggaagcaagcctcctttgcccccagtttccttctttatttaatagactcttaaccttgaggaagcaatctcattttactgccgttttgaagaaaaacacaaggcaacaaacttattcttttggacactatttgtgtttccaataaatcttgtactgtgttctgcgtttcataattccttgtatttatagtagttgacagatgaaatgtttgggagtctgtccagcaatggaattttgaattcaaagtactttctccctgagatctttacacccagtaaatgcagtagagggggaggcatctttggttttcaaaagctgaaggctgttgtagcatttatcctgcccctgaaaaccaagcagcgaaggatttgtggtatcagtaagccttagtaaacgtatactatcaactgttgaaagcattgcgaactagtttttataatacatattatttcagttaaaaggactgtgatgataaagaatgaacacatttactatttgtcagtgttagtaccagtacagcattctgcacacctctgagtaaatcttgtccacactttcatatctgattaaatctgatacctaattaaaattttgcttactatggcttttggaagctcttcattaaatattttccaggaaaattttatctttatatgctaacattttggaatttaaagacaaaggaaagcttttctctttcaaccatgctattatgtaatcctttttaatttaatcacttaagacagttacgttgcttagatttttatagacacctatttatagactgtaaaccacttaacagcagaagaaaagagaatttaacgttatacatgagcttcatttcttttttctttttaaggctttttttaggggaaaaattatttgataatagaatgttgtggtgggaagagcactagattatattctgaaaactcagatttcagttcattccttactgtttattagttacaaaccctggccacttagcctctctgagcctgtttcttcatctgtaaaactgacattgtttgtaagggtcagctaagccgacgtgtatggaaatacttcaaactccgaaatggtataaagtatgtgatgtcttggttcatttcagagttttcattcatttcaaaatggctgctcttaaaattcggtcatttcacagattttttttttttttttaacgaaatttaaccttttagactgcattttcatttttggagtaaatcctggtattctgattaaaagaatatgtggtgatggtggtgatgatgatggtgctattggtgatggtgatgatggagttggtgatgatggtggagataacaatgatggtagtggtcatcatgatgctggtggtgatcatggtggtggtgctgatggtggtggtggtggtgttggtgatgacggtgttggtgatggtcgtaacagtggtgatggtggtggtggtgatgatgaggaagaggagacattcagggatttgatagaactaaaagcatattttaattagctcagtatgcaatacagtccccggtttgggggttttgtatgtataattttcagagagattcctaagcctacccttcaaaaaagagcttataagtagtaggtgcttttctctttctccgtgaacctgcattgaattttcagtaaaattaatttgtgaagagccagatcatttgatgaggtggaagaaccaagaagtaaggaacaagagagcagctgaagtatggaaaaaaaggaaaaaagaatagcagtatgtctcataatggtagccaaaggtggaatgtcagcagctgcagcctgaaacttcagtgggctgggctgggctgggcacactccctgctcctctcctgtgacagaagatgtaccaggccacagtgtggccccgaggctgcagcctatcccaagaagtgcaaggaggctatagaggtgggagaaaagagatggttggttggttgattggttccttcttaagtaaaatagcattgttccaaattgacttctatagtaaaacatattttttataattttttttatttctgtgggtacatagaaggtatatatatttatgggttacatgagatattttgatacaggcatgcaatgtgtaataatcacatcaggataaatggggtatcagtcatctcaagtatttatccattgtgttacaaataatcctattatactcttttatgtattttttaaatggacagtgaaattatttttagctatagtaagcctgttatgctagtaattactaggtcttatttattctttctgattattttttgtacccattaacccttctccacttctccccacccctcactctcgcactacccttcctagcctctatcttcataagttcaattatgttcgtttttaactcccacaaataagtgagaacatgcaaagcttgtcttcatgtgcctggcttattttaattaacatagtgacctccagttccatccatgttgttgcaaatgacaggatcttattctttttatggctgaacagtattccattgtgtatatctgccatattttctttattcatctgtttatggacacataggttgcttccaaatcttggttgttgtgagtagtgctgcagcaaacatcgaagctctctcttcaatatactgatctcctttcttttgggtatatacctaggattgaggtagtataacttattatcaaaccctatctatgttttcaacatagattcatagtctcagttgtaattttttctaactaaaaaagattttgagctatcagttcctcttgtactaacttctctgaatagataacccagtatttttgcaagtaacttcagttaagttggttgctagtcaacatggcaacctaagcttaatcttaactttaccttcaagactgaaaatttaagcatcatttatattactagcaaactgctttcaagtattgataagaattattcattcattcaatgtatgtttatttactgcttcttctctgtcagatactctgctgaacactggcagtaaaaatagagccagaataggtacgccttgccttcatggtgtttacagcctagagggagaaccagccagtcacacgatgactcacactagaatgtgtgctccatgagagaaagaagtcgttcatcttgtttatggctgtgtccccagcacagtagctgcatataggaggcactcaataatagttattgtttcaattgagttggcaagctctgggcccatgagccacatctggcccatcacctatttttggaaataaagttttgttggcacacagccacactcattctgcttttgtgccacagcagcagaattgagtagttgtgacagagactatatggcccacaaagcctaaagcattttggctattaggccctttacagaaattgtttgccaccctggttggtctaagtgacttgaaaggaagactgttacaatgaatgtatgagggagtcctaactagggaacaaaaacgtcccaaattaaatgtccatggatttgagatgggaaaaaagaatagacattgagcccaggcaggggatggcacctttaacagccctgtctttgggagggcaggacacagatggcacctcaaggaactgtctggagcacagagcaggagaaagaatgatatgaatggcctcaaaagagacccaaccattggtgacccactgggcattcatttggaaaagagcactgtatgcagtgttgagcacattattgtgggtggggcagtagggggcatgggaagagacctgttggaaagttatttacagtaatccagtcaagacatgagggtgcttggaacaggggcagtcagagggaagttttatttcttgttttaatggaaaaggttctagaaatacccaatatgtaaactcaacaggcatgacttcatccttatggcatcctatatggccatccttagggcacttcagctattggggatggatattggcctttgtagaagtgactttgcttcctgccagtattgccccattggtggttattttgctgtggcatagttgagatctacacctcaaagcccgggaaggtctgagtaggcggcgtcattgtagtggaagtggttccctcagaagatggacgtgcttgttcaaagcagtctgggctgtacaagtgcagctgattggtgacttcagctagaactcagattgtagcactatgcatgtatggttttgtttgcccaggaagcatatattgtttgcctatatgtggcaagcattttgaatggaaaactaaaaagatatttgccacgccctcaaggaactcaccttcagaaattagacacttaattcagggatcagatgggtttttaatcagactgctctgccgcctgatttgtatcacatttaaacataaaaattaaaaattttgaaaatattttttcaatagaagaaagtatatagaaaataatataactgtgttcacaatagagatttaacataatatcatgccatatttgcttcagggctctctattttaaaaatgttataggtatcatcctctaaccccattctggtccccatcccacccccagagggaaccacaattcaaaaattgtagtgttgtgtcactttcatctacagtgtgacattaaagtgcatttcttgattattaatgaggttgattattgtttcatatgttaatggcttatgagttttctcttttctaaattgcctgttcctatccttttcccatttctggttgggttgttggcctctttcttaccgatttttaggattcttttttttttttttgagatggagtctcactgtgttgcccaggctggagtgcagtggcacagtctcggctcactgcaacctccacctcttgggttcgagtgatactcctgcctcaactcccaagtagctggaaccacaggcgtgcaccaccacacccggctaatttttgtgtaagtagagacgaggtttcaccatgttggccaggctggtctcgaactcctgacctcaggtgatccacctgcctcggcctcccaaagtgctgggattacaggcgagagccactgcgcctggccgggaattctttaagctgataaccatacattatctgttgtatcttctccctgcctgtggcttgtttttttagctttcattatatgatatcttttgttatatagatgtttttaatattagcatagtcaaatttatcacctgtttatgtcttacgtatttcatgtcttctacaagatgatacaatgtccaaggtcatagagatggtctcctttgcttccttaataagctttaagaagttttgcttttcctaattcgctctttactttatctggcatgtatacgatataagggatctactttcatttcatgtggctagacagttgtccaacagcatttattagccaccagcttataatgctatccttctttcaaacgtgtcatataattgagtatgaacctgtcaaattgggggctgagcaatcctcaagtcctcaaagtagaccattaacaaagggcagatcattttacagtgtgactgttgtggaatggaaccaataatactgtgtattcgaatggcacctcacatatggaaaagaatgcattggtcagccaggttgttaaccccctgctttctcggtgtgggttgcagtgagtgctgtcttagtcaagaggcagcctgccttatggcacaacctgtccatgagggaacccaaactgatggtaaaatgaaatgtggtaatatttgctggcaacaagccataatctctgtgtgttaacttggtcttattttctgtgttaaatgaggaatggcttatttatctctttagttagttattatattagatagtttttagagtatgtgcaaaaccaaattgtcataaaccagggttatagagccaacccctaataattggcagtgaaaagaacctagtcattttatagcagtttcaacatttaaagttttctgttgcctgtcttcatttttcctttgtagttttcacctggaattacgtacctactttgaaatcacctagagcataattctaaaatcattacattactcttaaatcaggcaataaaaatctcttttaggttgatattagctttagtatggtctttctaatgctaattttttttgcacacttcctttttttcctttagctccatcaaactttaaaagagaatttatgtgggaaattcatgttttaattgtccatacgatttttcttgttaaaataaatttgaagagaacataattaaaaggatctaaaagagaagaaaatattttattgcagtttatttgtatattgtagtatttagagaaactcaccaaggatttctaaatcacatatgtgagtttgttgtatgtttgggttaaattatttttttaacatttcttttactttattttttagtgatacatacttggaataaagtctgccaaaaagttgatcgaaatataagtttgactgcaatgttggaaatactcaaataattgttaaagtcataggaaataaaatgtagatccaaacaggggattctttaaaaggacccgaagagttaaatactataagaagatggcatataaagttattctagggatctccaaagaaaaggctctaaagaaatagaaaacaaggattgagagaatctttagagatccaaaaagatagcacttgtggggctgagattcttcttccttctttttcttcttttagtgatgtccttgagctacagattttttttttttattatgaatgtgcaggagacagtgataaaccaaattgcagataagatcagataaagtagtatacagctaattaaacatttctaatccttagtatttttgataacataagatagcattgtctcatatgtcttttctctctttccttccgtcaccacttcccccaccccaaatattggttctgttatgattctgcaatgcaatttacaatttttttctactgaaagccatgtttcgcctctatataatactgtaacctaattagaggtcttaaagagaactacaagttttattcaaaactctacgtgaacttactgtcattgccagtgtttctcagtctctgtatttataggagttgcaaagtcacttatctttcaaagctgcctttactacagatgctttcagagatgctgatgtgctaacgtgcattgtgagtattctccagggggaataatagtacagtgtagtggtaagaattgatataattttaaaaacattaacgctctttaaaatgggatctattaagaagacaaatagcttttttctttaagtcatttttttagtgtttgtcattcagatttgaagacttgaaataaagagcttccccaaagactagttaacagttgattcattgacaaatgagtagaaaatctaattttgaattttgtttcatctttttcagatctcagtcatagtggattggcagatcattatgaaaattcccactggggacagcagcctacttacagaagcgaagccaactgcagctgggataaagtgataatagataggactgacaaggaggcgtggccttccatcacaggaacagagactgaatctgcctcagaatgtactacagacactgactctgcctccaactgtggctcagagaacagtagcatggctacagggagtgcccagggcaacttcactggacataccaagaagacaaatggcaataatggcaccaatggcgcactcgtccaaagcccttctaatcagagtgcccttggagcagggggagcgaacagtaatggaagtgcggccagagtgtggggtgtagccacaggctccagctctggcctggctcactgctctgtcagtggtggggatggaaaaatggacactatgattggagatgggagaagtcagaattgctggggtgcttccaactccaatgctggcattaatcttaaccttaatcctaatgccaacccagctgcctggcctgtacttggacatgaaggaaccgtggcgacaggcaacccttccagtatttgcagtccagtcagtgccataggtcaaaatatgggcaaccagaacgggaacccaacaggcactttaggtgcttggggaaacttgctgccacaagagagcacagaaccacaaacgtccacttctcagaatgtgtctttcagcgcacaacctcagaaccttaacactgatggaccaaataacactaaccccatgaactcttcacccaaccctatcaatgcaatgcagacaaatggactgccaaactggggcatggctgttggtatgggggccatcatcccgccccacctgcaaggccttcctggtgctaatggatcatcagtttctcaagtcagtgggggcagtgctgaaggaataagcaattctgtgtggggactgtccccaggtaaccctgccacaggaaatagcaattctgggttcagtcaggggaatggagacactgtgaactcagcattaagtgctaaacaaaatggatccagcagtgctgtgcaaaaggaaggaagtggaggaaatgcttgggattcaggacctcctgctggtcctggaatactcgcctggggaaggggcagtggcaacaatggcgttggtaatatccattcaggagcttggggccaccccagccgaagcacctctaacggtgtgaatggggaatggggaaagcccccaaaccagcattccaacagtgacatcaatgggaaaggatcaacagggtgggagagtcctagtgtcaccagccagaaccctaccgtacagcctggtggtgaacacatgaactcctgggccaaagcggcatcttctggaactacagcaagtgaaggaagtagtgatggttctggcaaccacaatgaaggaagcactgggagggaaggaacgggagaaggccgaaggcgagataaagggattatagaccaagggcacatccagttgccaaggaatgatcttgacccaagagttctgtctaatactggttggggacagactcctgtaaagcaaaacactgcctgggaatttgaagaatcccctaggtctgaaaggaaaaatgacaatgggacagaggcctggggttgtgcagctactcaggcttcaaactcaggggggaagaacgatgggtccatcatgaacagtacaaatacctcttcagtatctgggtgggtcaacgcgccacctgccgctgtgccagcaaacacaggttggggagacagcaacaacaaagcgccaagtggcccgggggtttggggggactcgataagctctactgctgttagtactgctgctgctgccaagagtggccatgcttggagtggggccgcaaatcaggaggacaagtcacccacctggggtgagcctccaaagcccaaatcccaacactggggagatggacaaagatcaaatccagcctggagtgcaggagggggagattgggcagattcatcgtctgtccttggacacttgggggatgggaaaaaaaatggatctggatgggatgctgacagtaataggtcagggtctggttggaatgacaccacgagatctgggaacagtggctggggcaacagcacaaatacaaaggccaatccaggtacaaactggggggagactttaaaacctggcccccaacagaactgggctagcaaaccccaagacaacaatgtgagtaactggggaggagctgcttctgtgaaacagacaggaacagggtggatcggggggccggtaccggtcaaacagaaggacagcagtgaagcaactggctgggaagaaccctctccaccgtccattcgccgcaaaatggaaattgatgatggtacctcagcttggggggacccaagcaactataacaataaaactgtaaacatgtgggatagaaacaacccggtcatccagagcagtaccacgaccaataccaccaccaccaccaccactaccacgagcaacaccacacacagggtcgagacgccgcccccgcaccaggccggtactcagctgaatcgatcaccgttgcttggtccaggtaggaaaggtatttcatgtttctttacaagtaaaaaaaaaaaaaaaaaagcttattctcattatatattcatgaatactccgagtagtgttttttatagcaaatagcattaaaataatttaagttccctatcaccgtgcaatattgtatctaaagattatccagtgagagcaaagtaggatcctctggtggttttctattcaagaaaaaaatatattaagcacactcagtagaacatcaagcgaatgttttggtggtggcggtggtggcctggggtggagatgatggatttgaaagcaatgacagtgcatgattccaagatttcgtaaccatttggatacaggagcaaagaagataggatagacatggttcagaacttgggcaagttggcagatgactgtgtcagttcactgacatgcccatgagcacagcaggaggcacagagctccaagtgtccagtgaggacaataaaaggtcccagatacggaagaccagttctcagccagaggggcaaggtccagagtagagagattttaaggtggcaaagtcgtgagcatgtttcagagctgttagaaaggaacaagtggagatgagaatgaatgaagagggaagagatccctgtgtccagcaggacaagggcacttcatccatctcgtgaagcaaggagcaggaaagagcgctgcacaggtgggccaggctgtcatggccagagggccaaggccaccttctggggttcttttctctctgggagtgtgaatactagcccagagtggaggagggctggctaggagcagcagcacgagtagagagggagcatgcattagcccatgtagaggacaggaacagagaactgacttgactggggcccctggagggttgctgggcaatgtcagggcccagagatcaccatacacagtgaatttattgggacctgccatgtactaggctgtactctagtagctggggaaactgcaggaagcaaaacagtcaaaaccctgccatggaggggtctagatctagtgagggtggcaaacaacacacgaattaaagtatatacgtagtgttgggcagtgatggtgcagggaggaaacagtaagcccagaaggtctgcatgcgggggccactggagttggggaatcaccatcttgtgtagggcagcctgggcatttgggcacctttttggtttttgtcataagcgttcaacaggagaatgtcctgcctgctgcattaattcaattatgactgccctacaggacctcccctggcccaccagctgggccctccagcctcctcgtagacttcttggtggttcacttgtgtacctctctgaggctgccacatcaggaatcctttatggatcctcaagacagttttagcctccagctaacgcatcagtgtcactaaaccagaggtcaaaaatcagtggtccgtgggctgcacctagtcccacaaatgtgcctttttggcccacattttttctgtgaattggcatttttttaatgcaaatgttttatattaaattccagatttctggcttcctttggaaacctgaaaagtctgacattggattcacatggcagcagtcagtcagagccacttgccttcataagggcctgtgcattttctccataccatgtcacgttgccccccgacccctgacggttcccaacactgaggcttttgatcagtagccactgagcatcatcaagcttgcgctgctgttcttacgctgggcctgtttacgttaactgactggttccttggagtacttgaatttgtgattccaattgtttactaatatatgactaatatttctaggcccttacattttataaagtacttggggggataaggagaagcaggaagaaggaaaatgaagggatttgaaaaataagattaggtcgggcgtggtggctcatgcctgtaatcccagtactttgggaggccaaggcgggcagatcatctgaggtcaggagttcgagaccagcctgaccaacaaggtgaaaccccatctctactaaaaatacaaaattagccgggcatggtggcgcatgtctctaatcccagctactcaggaggtgaaggcaggagaatcatttgaacccaggaggcggaggttgcagtgagctgagatggggccattgcactccagcctgggcgacagagcgaaactctgtctcaaaaaaaaaaaaagaaagaaagaaaaataagattattcctaagtaaggaatagtctagtgggacaggctagtaatatcaaatttaatagagtttaattagcattatagtaaaggtatgcagaaagtgatctgagagcccccacctgtaatcccagctacttgggaggctgaggtggaaggatggcttgagcccaggagttcaaagcctgcctgggcaacataacgagaccccatttctttaaacaaacaaacaaaaaagctccaggaacagaattaatacagtcatgcatagcttaacaatggtgatacattctaagaaatgtgtcatcagacaatttcagcattgtgttaacattataaagtatagttacataaacctagatggcatagcctcctgctcacctaggctatacggtacagcctgttgctcctaggctacaaacctgcacagcatattactgtactgaatactgtaggcagttgtaggacgatggtaagtatttatatatctaaacatgaaaaggggacattaaaatatggtataaaatatttaaaatggtgcacctgtatagggcacttaccatgagtggagcttgcaggactggaagtggctgtgggtgagtcagtgagttagtggtgagtgaatgtgaaggcttgggacactactgcacactactgcagactacgcacaccactgcagactactgcacactactgcagactacgcacaccactgcagactactgtacactactggagactactgcagagtactgtgcactactatacaccactgcagactactgtaaaccactgcagactactgtatactactgcagactactgcacgccactgcagactactgtacaccactgcaaagtagagttcaccactgtataccactgcagagcactgtacatcactgtggactactgcgcaccactgcagactactgtagactactatacaccactgcagactactgtagactagtatacaccactgcagactactgcacaccactgcagactactgtacgctactggagactactgcagactactgtagactactatacaccactgcagactactacagactactgtacactactggagactactgtggactactgtacactactatacattactgcagactactgtacactactatacaccactgcagactactgtacgctaccatacaccactgcagactactgtacactaccatacaccactgcagactactgtacgctaccatacaccactgcggactactgtatgctaccatacaccactgcggactactgtacgctaccatacaccactgcggactactgtacgctaccatacaccactgcggactactgtacaccactgcaaagtagagttcagcactgtacaccactgcagagtactgcgcaccactgtagactgctgtagacttggtgaacactgtacgcttaggccacactacatttattaaaagattaaaagatactttcttcagtaacacttagcttaaaacacacattgtacagcttcacaaaagtattttttatattcttattctatgagctttttttttgtaccttttaaacttttttgataactaagacacaaacgcacacgttagcctaggcctacacagggccgggatcttcagtatcactgttgtccacctccacacgttgtcccattggagatccaataacaggaagtacagtaaagacataaactggtaacatagtcttgtatcagcatcatcagttgtgtgtgctagaccttgctgtgactggccgcacagtaggtttgtttacacgagcatcaccacaaacacgtggggaatgcattccgctacattatgatgggtatggcgtcactaggtgatgggaatttttcagctccattatatataatcttaggggaccattgtcctgtacgcagtcagttgaccaaaccgtcattatgcagcccatgactattttaaattggcttgtgtgtcccatccacccttagtggatagtcccaatttgaatgccaactcctggaagagttcaggctacagagggccctatgcctggcactggagtcgtgcaataaatgtggtctggccatggttggcagtcatgtatggagcatttttatggatcacctcattggatttttacagctccttgggcctcattttacaaatgagacctaggagattaagtagctttccaagggtacatatgtgggagggagatggtgaagtctcagatgtgtaatatataccatgacctgctgacatttctaaaatattacatccatgacaccctacagaggttagaaccacattgcatttgttgggggatctctcccctttgatacgtgatccttagaaactttttcttttagagacagagtcttgctatgttgcccaggctggtctcaaactcctggcctcaagccatcctctcactttggcctcccaaagtgttgggatcataggtgtgagccaccatgcctggccagaaactacttttttttttttttcttgaggcagagtcttactctgttgcctgggctagagtgcagtgacacaatctcgtcttactgcaacttccacctcccgggttcaagcgattctcctgcctcagcctcccaagtagctgggattacaggcgatcaccaccatgcctggctaatttttgtatttttagtagagatggggtttcaccatgttggccaggctggtctggaactcctgacctcaagtgatccacccacctcagcctcccaaagtgctgggattacaggcatgaaccaccatggccggcccagaaactacttttttttttttttgagacagagtcttgctctgttgcccaggctagagtgcagtggcacaatctcagctcactgcaagctccgcctcccaggttcacgccattctcgtgcctcagcctcccgagtagctaggactacaggtgcccgccaccacgctcggctaattttttttgtatttttagtagagacggggtttcatcatgttagccaggatggtctcggtctcctgaccttgtgatcagccagcctcgaccccgcaaagtgctggaattacaggcgtgagccaccacgcctggcccagaaactacttttaacttgtttttagtagccaaaacatgggagcttcatgctgagaaaggcattcttgttcagttaaaagggccaaaataattctcttttatatgaaaaatatttatagatttttttaaacaaattgcacatattatcaccaaatataaagaagaaaaatgtgctgtaactgctacaccttaacagagtgtttctgtactctgttctcccctgcaacttttgcagcctgtgcatgcgtgtgctctttgtaggtgtagcaatactataggagcagttgcaaatctagttttaccaattaaaagagacaaataaaaagttacacaaatttttttccatgtggaagtgtgctcacatgctgaaagtatgttaagtttagtatattgtacaacatatggggttatttgttcatttttttcatttataacattaatctctttttctaccactggcataaagtggctacactgagtattattcctgccctgtattacctgtgatgtttaactctcagacatgaaccaagccttcttttgcagtgagagcaaagttcatcacccttaagaattacaagtaatcatagcctttcactctccaaacttgttagaccaagctattatttgagcctgtagaagtaacagttccacaccagttcccttcatagaggtgacagcatgcaggagtggcattacccccggtggcagccccttgccctcctctctggggactgtgccatctgggcagtcagggtcagcaagggcagcagcagtctcagcacctgctgggccgtgctgcccactggcttgaatgcctgcgcagctttccatagctactgggattcccagacaaaagccttccacttgtgactacttcatgaagtttctgctatttttaaagttggtgtttttaggttttattcagcataggttgacctatgctgaatttatagaattttcacttatgtcagagtttgggttttaagttgtggatcattaccacttaagggtattgatctctcctgtcttataaaatatgatttctgaattacatttttgtgtgtgtgtgtgtgttgttttaaaggaacgaatgctacagtacaatcatttttgtcctatgcttgttgatattaattagttttctgtgagcctgaggaaaactggtagtattttaggaaatgcagtatagcttcctaaactggattgtctggacctggttcaggttcattctggagataaaacaacagtattagtccagagaaatatccctgtgcctgcctttttatcagaaattgtaggctgcctgagaagggctccagaggccgcacttgacactcctcgaacattgcctcaattactcagtctctggtgcgagccagaattgcaggacctgctaccttgcgctctgctgtgcatacaaagctattaagtcgtcataaaatcagtctgctgttttaccagttagtgggatgtggcagaaagggagaaagtgcaaacatagcatttatgtgtgttctaagggaatgaaagcagatcctaaaaatactcagcaacatgattacctcgcatactcagacataatattctgggacacttaaaaaccaacttgcagacacacaagagaacattgaatattaattaacaaaaccatttagtgagtaatggagcctcatagttggctctgaatctaacaatgagattgaagaagaacttccagggatttcatctctgaactcagatttcactgaaatgtagataattttagagtcaaatatgaaggccattatacagttgatccaagctaaaccagcagcagtggggtagtgacatcttactgtgtcttccaacaatggctagaagtaaaatatcattacatatgccaatcagaaaactggcaggcagtatactgctaatactgatcttagtctagaatttgttgtgtgttcattttgctgcctatttgcagctcttcagagatgtatctcagccatagcagggattccagctgtgctggtggtgaccactgtgggctcctacaagtcggcaaaggctctagccagaggcacactttactttgcatgtgggtacttaatctggtgatatttgctttaaaacttagttttctgaaacaattatcatcttataaaatataaaaccagaggttgtgtgcattaatcatggaagaggcatatctccaattcactaaactaaaacttggaaaaaattagatttaggaagcttctacctaaaaagatgagacgtgtattgtttctataagtctcattagcagcagaagccagagagcagtggccttccttccagactcctgtcctaggaagtttatcattctttagtataaaaactacaccaaaagacagtcacctgcagatggagtgaatcagcaagatcctgttacagctcagctgttttcacataacttcggaaatagatcccattgacctctgcagccagaagtaattctattttaagcactatgcagtagttactaaaagagaaattatctgagtgatctgtgctttttgtggatgtgggatttttcttgggtttggatttggctgggttgtttttgctttcctgtgtttgaggggtttggtaagtggggctggacttcagcaaggactggggagttgggagcctgctacggaagtaggaagagatgcttctcagtgcaagtccgtggcgtgagacgtgtgaaccccacatgcaaaggccttagctttaggtaccttcaattcaaaatagataaatgatgaagacagttgaaaatacagtgtgaggccggacacagtggctcacgcctgtaatcccagcactttgggaggctgagccaggtgggttgcttgaaccctggagtttgagaacaacctgggcaacctagtgagacccacgtctctacaaaaaatacaaaaattagctgggcatagtggcacacgcctctagtcccggctactcaagaggctgaggcaggaggatcaccagagcccagggaggtgaaggctgcagtgagctgtggttgcaccaccacactccatcctggacaacaggagaccctgtctcaaaaaaaaaaaaaaaaagaaaaagaaaatatagtgtgccccccgccaccgatagcagtaggaaagagttagcccattaaaatctgtattagtatcgtgaaatcaaaactgtataagatggttttccttttctaatacttcacatgatgactcaataaggcaggcagaagaagctgttctaagggaagttactgtgcagctcaaggcccgtggtcagtttctagaagggaccccgaatctgtaaccctcaaacagagtcccctgactttggaatggaagtgtcaaatgcccaccacaaaggctttcagaaaagtaggatactttgccatctgactgtactcttgtataatgagcaaactcttctatataaagtttcattgtacaaagacccatcttgatttcagataagaaagttttattgatcttacagctatcaattctgctctgttcctccataagcaagtacccaaccagccatcatagtaaatttgcattaagtttaaaggccgttggtatgagtaaaaaatctcatctcattaatatttaggtcagtaccttaaaaagccaagcacatagcaagcactcaataaatgcctgatcgattgcatttttaatcgtttatctttttttttttttttttttttgagacagagtcttaactctgtcgcccaggctggagtgcagtggcacgatctcagctcactgcaacctctgcctcccagggtcaagcaattctggtgcctcagcctcctgagtagtgggtactactacaggtgtgtgccaccatgttggctaggctggtctcaaactcctggcctcaagtgatccacctcaagtgagccaccatgcctggcctagtcctttatcatatactcttaattaattacaattggccaccttttaactaaaactttcctcccaaaaaggactgcccatcacacttataaagctatgtaagtggcatctgtggaacaagctataattaatttcttatttcatagaggaaagaatttcatccactgacttaattatctgtagtgcttaagatgtgatgtgcttaacaatgttcagtgagagaaagattctctgtttcttggtcctatttcttggccttttctctgtctgctgctcatttttatacccagcttccagatgcactctgttttctccattctgaaggaaagatgaagaatgtatattttaaaattgaatgaaaactacatatcctggctgtgttttattatccccatctctgtttgttaatttgaagaaattgaagggaggtaacgattctaagaccccatagtacggaaatattctgcaaaaagcagtagtatttgaaggatcatttttaaaagtttaatatcagtattttaaatgtaagaaatttgttctacctcatcaattctaactttaaaagaatccctataaattattaacaaaaagatgccaaattcactctgatgataaacacttaacagtggagattattttaattctatgtacttaaaatcattttctgtgtgctgaaaatacttgttttgcatcaaaattttctattgcatttcagtttttagcatctcttctagaacctttagagtgtcagatggtacatcctagtgtttctgttaggatggcattgtaggtaaattatagtcttgccagattcaactgaaaatgaaaatactgggccaggtgtgggggcaggcatctgtaatctcagctactcagaagcaggaggatcgcttgaatctaggagttcgaggctgcagcgcactatgatcacacttaagaacagccactgcacttcagcccaggcaacgtaacaagaccccatctctattaaataaatatcaaaatggaaatatttggttttttaatttttttgagtaagcaagtgttcttccatttctaagattttgaaacatgatgcttgcaagtcgtttgccttctccatgaaaatacttactagacatttctcctgcctttaagaggaattttaaattctttataaaaatcaatgaactatgcttaccacaatcttagtatttatccttagttttgacttaattaaataatttgtaatacctattgccttctcaaagagatggaggtctagagatgataaacaaattctaggtgagttcattatttaattacctacagtaaattagtatttttatagctaattggtctttagcaacacatgagttattttagcttactaaaaccttgataatttttattagctatgttaacgtctctgatttaattttgtcctttcaatttgtaaaactacttctcccaatatatattattgtcttttgtgtaattaaaggtaatattatagttagcaattgctggcgataactggttaggactaactcccctgttattggtaactatttgcataatatattcctcagcatagagcttgtaatttaaaatgatttttaggttgcgtgtccttttgttattaatcattcttactgcattttcttagaataagagtatcaagggaactgattccatgctatttttagtcagaaaattaatacattttgtaattgatattgtaatatccatgttgaggccaaacaatgtaaaattgatggttaactatttgcattttatactgtaagtttttctcttgcacacagtcacatgcttgctacagttatgacttaaaatatttatatttctgtctgagcaaaatgtatctatatgaaaattacaactgatacaagctgtcaacatatcaacagtgtcaggtgagcttatggcagaagcaaaagattagaatttgagtttatttggaaaaataaaattgacctatgcaatataaaatgttttttgtactgaagtgtgaagggcgtggggaaatccttcttattgcctggtttcataacctcttctgtgcctgtagataatgcagttggcccttgaacagtttgggattagggttaccaaaagtataacttaggacttcccaaaaacttaactacttgaccagaagccttattgatagcagtcagttaacacatactttttatgccttcagagttttatacaataagataagctagagaacagaagacattattaagaaaattgtaaagactgggtacggtaactcacatctgtaatcccagcactttgggaggctgaagcggggggatcacttgaggtcaggagttcgagaccagcctggccaacatggtgaaaccctgtccttactaaaaattcaaaaattagccgagcatgttgttgcgtgcctgtagtcccagctactcaggagactgaggcatgagaaccccttaacccgggaggcggtggttgcagtgagccaagattgtgctactgcactccagcctgggcaacagagcaagactctgtctccaaaatatatatatatatataaataatatatatatatgtataattttaattgtaaggagaaagtacacttactattcattaggtggaattggatcatcataaaggtcttcatcctcatcatcttcatgttgaggagcaggctgaggaggaaggggagggcttggtcttgctgtctctggggtggtggaggtggaagaaaatttgtataaatggatcactgaagttcacacccgtgttgtcaagggtcacctgtgattctatatgcatctctaacctgtttccacaagggaccaatccctgaggatgctgttgcaacaggacttggcaaaggaatgaaagggttcctgaaaaaccctcccagagtacctgtaggaactactctgatccataattcaactctcttctgccttctaagacagatacctcagatctctctcagcttgtgggtggtaccatagaaactgtctgcattttccagttatgactttacctttatgtttttaatctgccatcttctcatttctttgcccagataaggtgatctgtgtctatgatggtcaaaagataaacaagaataatatttcagtatatatttgcaactcacaaatttttcttagaatgatttcttttatgtcattacatataatacaagatgtaaacaagctatttaaccatagttttaaactattcttttaaaccctactatgttgcaaatgctgacaattgaataggctttaatgtttaatggacttttaaagttgaaaataggtagagggcaggagttagaaaatggcaattttttattttttcatgttttgagacagattcttgctctgtcgcccaggctagagtgcagtggcacaatcttggctcactgcaacctctgcctcccgggttaccaaagtataacttaggacttcgtaaaacttaaccacttggttcccgggttcaagagattctcctgcctcagcctccccaatagctcggattacaagtgcacgccaccatacccagctaaatttttgtatttttagtagtgacagggtttcaccatgttggccagactggtctcgaactcctgaccttaagtaatccacctgactcccaaagtgctggaattacaggcatgagccaccgcatctgaccagttttaagaagccaaacaagccatgtgcagtgacacgccccagtagtcccagctacttaggaggattgagtgagcccaggagttgagggcagcctgggcaacacagcgagtccccatctctaaataaaaataaatgaataaaaattttaaaatacaaagctaaacaaatctgattacatgtaatacatttgcctcctttaaattttctactaaaggctattctaaggatagattatcttgaaattattttgaaattgaaaactgaattatatttttgcttttctctgatgcactttcattattttctctaccccttggaacctttttcagtttcatcaggctggggagaaatgcctaatgttcactcaaagactgaaaactcttggggagaaccatcctccccttctaccctggtggataatggcacagcagcatgggggaagccacccagcagtggcagcgggtggggagatcaccctgcagagccgccggtggcatttggaagagctggcgcacctgttgctgcctcagccctgtgcaaaccaggtaagcctagcatcctgcttgccctgatctggcaatttggaaatgactcaaagtattgaattttaaagattagagttttaggatactttcctcattatatttacactttaactacaaaccaagagtcttggccaagcacagtgcctcacacctataatcccagcactttgggagtccagggcaggaggatcgcttgagcgcaggagtttgagaccagcctaggcagcatagtgagaccttgtcactacaaaaaaaaattgaaaaattagccaggcatggtggcacatgcctgtaatcccagctattcgggaggctatggtgggagaattgcttgagcccgggaggttaagactgccctgagccatgactgtaccactcatgagcctgagcaatagagcaagaccccatctctttaaaaaggaaaaaaaaaaagccaagattataaaatatttgccatgcctgatacatgaacacaaaggagcttttaagagatgtccataccctccttttataataatacaaataaatgcaaaagtcaaagcaaccccgcatattatgtttgattctcctggtaatacccacactacttcagcagtattcttgtacctgccacattaagtaatttaaacctgctatttcactgagcaagatagataaaacatgtcatctccttgagattagtttttgaaaatatgtattacctcacagcagcctaacgcatcttgccgtattgccctgctttcatcttgtcaacagaattccactgggtggaatttgccatgtttgttttaaagttgtttatgcctaaacaacttgaaaaaattttaaaaaggtacattttcctcccattttctgaaagtgtagcaaatatgcaggtaataagtatccttataaatgtccagattatgtataccaagtggaattcttatatgggtgttttgcaatgtgatatttgtaatattaacatgagtataagattactgatttaaatctgatattaaaattaattgtggctgggcatggtagctcacgcctgtaatctcagcactttgggaggccaaggtgggtggaccacctgaggtcaggagttcgaaaccagcctggccaacaaggtgaaaccccatctctactaaaaatacaaaaattagctggacatagtgatgagcgcctctaatcccagctactcaggaggctgaggcaggagaatcgcttgaacccgggaggcagaggttgcagtgagccaagatcaggccactgcactgtagcctgggagacagagactccatctcaaaaaaaaaaaaaaaaattcgttgttcacataactgcagaagcttcatcttttctttggacattattagatgtcctagatcttaaaatgcaactttattggttttgtactttgtggttttttttggttttttttgttttttgttttgctaatactcgatagtatgttccatatagccaccactctgctcaaagtattccatttatattacttttttttacaaacctaaaggataagggaacttgtgagtatttagattcatgcgccattttgagcattctattttgagaatttgtccttggaggcacagttatgtgcctattccatatgtttatcagccttgtatcttcattgaagacccagctaactgtgctcttacctagtctttgcccttcttcatattcttccaagaagtgaaaatttggggtaattttgataccgaaaatcactttgtattttaagataggaggaaaaaacaatatctgaagtggaaactcgatagtcactttgtagctccatctgcctaaggcctccatcctgctagtctgtaagcatctcctgcgggcttgttagaaatgcagcctgtcgggcccaacctcaggcctgccagacttcacatgatccagctgactgtcacgagtggacaggtttgagaagctctggtctgtgtgacttaatgctcataggtttggatcaagcagtgattaagaatcagacagagatgctcatttcagcagcacatgtactaaaattggaacaatacagagaagattcgcgtggttcctatgcaaggatgagatacagatttatgaagcatcccatatacaaattttcctgccacttgtgatggctcatgactgtaatcccaacactttgggatgccgaggcaggaggactacttgagcccaagagtttgagaccagcctgggcaacatagtgagaccccatctctattaaaaagaaaaaaaaaattagctggatgtggtggcacatgcctgtagtcctagctacttgagaggctgaggcaggaggatcacttgagcccaggagtttgaggttgcagtgagctgtgattgcactactataatccgggcaacagagcaagaccctgtttcaaaaaaaagaaaaaaacctacaaattttaaaaaccacacaggacaatgaaatgttttaggaatctacatttctgtagccttttcataccatgtagagattgccaccttccctggtggccccaggatttgttcttagcatgtttatgtttcagaatgatgtgtagttggttaaggaagtttagaacagcacagagtacaaatagctgatgtttgaaggaaaaattatatacatatacatgtttatttacatatgtagcaagagaaattcaattctgagatctgggagaaatgaaggcataaaaaggtagattacaatgcatcatttgtcccacgacccctaaattatatgttacagtggaagcattgtctgcgttagggacatgaatttgataagttcatgtttgctctgtttctagcttcaaaatctatgcaagaaggctggggcagtggtggggatgaaatgaacctcagtaccagccagtgggaggatgaagaaggggacgtgtggaataatgctgcttcccaagaaagcacctcctcctgcagctcctgggggaacgcccccaaaaaaggacttcaaaaggtaagtacaacactcttaacgacggtacaccctgaaaaccaaaggtacttcagacacattcagtatccagttaatcagacaaaaagatagacctgaggttctcaaagtagtcttaggacccttggaggtcccagagaccctttcaggggagtaagcaaggtcacaactattatcatgccagtactaagactgtctttttcatttgaagtctctctccggtatagggtagaggtgtccagagaactttattgtagcagagaatgtgcagaaacaggcatgaaaatccagccatttctcttaagccagacatagagatttgccaaaaggcaaaacagtgccacccttctcatgaaaaattaattactttttattttaaaatgttaggttaatgtgtagtgactattatttttaagcaaaattatatttttaaattttctcagttttaatttctaatacagtaaatagcaatagacacaactcatgtcaacagaagttctttgggatcttcagtctctaagagagtattatagggtcctgagaccaaaaagtttgagacagatggttaagaagtcttaaaacagatgggcaggcagggcacagtggctcacacctgtaatcccggcactttgggaggccaaagtgggtggatcacttgaggtcaggagttcaagtccagcctggccaacatggtgaaaccccatctctactaaaaatacaaaaactagctgggcgtggtggtgggtgcctgtaatcccagctactcgggaggctgaggcaagagaattgcttaaacctgggaggcggaggttgcagttgcagtgagccaagatcgcctcactgcactccagcctgggcgacagagcgagactccctctcaaaaaaaaagacacaaatgtgcggtcatctagaaaacactgagatacacatctcatatatacatgagctacatgagacgtgtatctcatttttttctagatgactgcccaattcagtccacattcagcatgactgaatttcaagtaggtcacaaacttaaatattaaaaatatgaaaacatgaaagaacattaaaaacaattttggactcagagaggcctaactatgaccaaaatctaaaagccataaaataaaatttttttgtgtcaatagataaatgtaaaaactgtacatgacagaaaataccataatcaaagtcaaaagaaaaatagcaaactggaaaaatatgtttataactcatatcatagagagggccaatcccctgatacataaagtcctagaaactgatttaaaaaaaaaatcagccagaaacccagtagaaaaaggagcacagaatgtgaagagtagctggtccacagagaaggagcaccagtggctcctagacacggactcacaggaaggcagtgcagttccagacagcactcagagacacctgccatttttcatctctcagacccacagaaagccagcgttttgatttttttatttaaaaaaatttttttagagacagagtcttgctgtgtcaccttaggggctggagtacaaccttgaactcctgggctcgaattgtcctcctgcctcagcctcctgagtagctgggtctacaggtgcatgccactctgcccaactaattttattttttattttttctgtagagacagagtctcactttgtggcatttatacagttttgtattgcagcatttttgtagtaaaaagataacaataatttatgtgtacattgatggagtaacaagttaattatgtcacttctacattatacagaactaaaaggaaattctatctatgtattgatatgaaaagatcactaaagtacattgttaaattaaaagcaaggtgcagaaaaacatgtacagcacacaccctattttgtggggtaggaggaagaaaacgtgtgtgtgtgtatgtgagtgtgtgtatgcatgcatgcacacgtagtgtatcagcttctacagaatgttctaaattctctggaagggcaaataagaaactgctatgagtagtgcctcttcgagagaacaggaactaagcaaatggggtggcatgagatgaaaactttctttataccttgtttatacttttgaatcgtgtgaatgtattcatgttcaaaaaaatatagtttataaaagcattcagttaataatcagcagaaaccagaaactaaaatcagagctctccgctcatgaggagtagaagtgattacagacatcaaaaagaatcctttttacagttgggctggcaaataatccagttaatgatgggaccaaaaatagcaaattggtaaattaaaatcttgactaatctggctctggcagcatagtaatgattgaaatagccccaaaataagctagttccttgaggaaagaaagcctgtttatagagctccatatgctccatgatatagctgtggcaggctcaattgtgaaaaacactatgaagaatatttttggaagggaatttttttcatattgtaataatgcatcattagaacctttgcatttataggctcagagggaagttattgagaagcctcctggctcttctgtggtgccgagccctcccccacccccactgctctttctgtagctgacctttttcctcatcctctccttcactgacattttcctccttattccttttctctaccctatgagctataagtaacaaatagttaataaaattaacaggttgtttcatcctttcttcttgctgcctctttactcattggaataaaccccctcattttatcatttttcagaataaagcttagaaaaggcaaaaagtgtaatttttagtaaacttcacatagggctgtgttcaagggagcgcttaggattattggatagtaaaagtagtctatatttgtgataaactaaattaattatctgggaaagagaaataattatcttgctttaagttcataaattgcacatatataccaacctgcaaatgtaccttgatgctttccgtagcagtagccacgaaatactgttagggagtttctggaatacagcattattcaatgttaatacaaaaagatcctgtgacttttaaatgaccctgaatttaggctgtctcccatttctggtagaaatgcattaaaatgtagctcatggacttccccctttcccacactttgttcaagggcatgaagacgtctggcaagcaggatgaggcctggatcatgagccggctgatcaaacaactcacagacatgggcttcccggtaactggcgtcgtagtttactgctacccaccatgcttcccaaaatgaaatgccctcattgtttcctctccatgtttgttatgtgtgtcagaagacaccaagattgtttgaggaatgagatattgacatcatctaactcttaaatctcccttttacctgggtagtttgggttagagatcattgctttgaactacagcaaagacccacacaatttctatcaaaaagggtgtgagagccttttcctagaatagaaaatgctttttttttttggagacagggtcttgctctggcacctaggctgcagtgcagtggtgtgatcaagcagtcctcctgtctcggcctcccgagtagagctgggactacaggcgtgagccaccatgctcggctaatttttgtatttttggtagagacgaggcttcactgtgttggccaggctggtctcgaacacctgggctcaagcgatctgcccgcctcggcctcccaaagtgctgggattacaggcatgagtcactacgcccagccggaaaatgctgtgtgatttttaattttcattggtttatacagttttatgtttacttttaatttataattaaacgtgaatttcattagtgtatagagtatattgacagagatcacaaaagaaaacttgatgtaaagtactaaggtttcatatccagaaaaagtatcctaaccagacctacttagttcctaagtttccagtcatacgtagggagaattcataattgtagggcgttcccctgaaaataccacagtctgttcaattcctgagattggatggcagttcagatggcaagggatgtcgcccatattcgccatgtattcgcttcatgggacttctttcaaaatccttattcaaattagtgtttatctttcagttaccgtagatgcttctaaaagaatgagtccagaatggcctccatgtagcggaggaaccccatccttcacactgggcacaggccctctgtattgggcagggcattgtgttggtggcccaggctctgcctgtgtgagtgggcaagaggttgacggtggcttcagcgtgtcctgatttatactgtctcagttatcatggcaccctagcggcttcagtcatcccctgagattactgtgttccagtcataaattatcaaaatgaatctacttgttttgtttttctgtttcttagagaaaagttgttgatggtggagcctagagttgatgaagcgaaaaatgcagctctgcactccgacagtgactgacatagttgctgggactagagagagacatggagatgggcctcactgggacaggaatcctgtcctaggagagcatcctgtcctcatggcaggtgtccttgtctgtggccctgctgtcttggcatagattgcacctttatggaatcattgctactcagtgttgtacagaatgattttaggaccagacacagtggctcacacctgtaatcccaacactttgggagcccaaggcaggagaaccacttgagcccaggagtttgagaccagccagggcaacatggagagaacatatctctacaaaaataatactaatagttacattttaaaaaaatgaaaatgattttaggagtacttacaaggttttactgccactctgcattttgtttccaaagtgttaaatacaagggctttactttgaaaatcaagtcagtacattttcttattacaagtatttttaattcaaaagacattgtctctaacctcaacagtgaagaaatgtatttccagttccaaaacctaataactatgtctttaagttgatagtgattaaattgtttgtaacctttccttttgttaattaatgtgcactaatgaaaactctgttttcctacacagagagagccagctgaggaggccttgaagagtaacaatatgaatcttgatcaggccatgagtaagtcatacaacatcctttttaaaaaggtacccagctgtgaagttttactttccagaagcatttgattgtagtcatggtttaatggttaatatgtcctgggtagacaggaccaggccacagtgaaggggcaaccacacaacaagctggaaccacagagggagcctcttgggattagcggactttggaggtgaatcgccaatgccatatttgaagcatgttggcttttctcatattttcccgttatgttttgagggaaggtaataatgacactctgagagacactggaaccacacactagacttcagtggacactgagtgcgttcctcgtgccttgccccagaacggacttgcctaggggccaccagaagcgttgccttgctggctgagcaccaactgttgttgagagagaagattttctgtcaaggaacaagcaaccctagttctagagctgctttaataataatgttaaatatttacatttaaatatagtcgattcttattttcttggtagttatgttctataaagtcaccacaaacactgaattaacgaataccgaaccagtgctcctaggagacatacagggttgggttcctatgagcctctgctcacaacatttttgtcaaccaatcaatatataaccttgttttatatgtttttctgtttcaagacaccttatttaatattgatatattagccaagaagggtgtaacatttttctgaccctggataatgtgaccataaatttatttggctttcatactcaaaacaatgccgtccaccacacttcctagtcatcatctcatgaatccacaaatttagcctcttttccatagctctgtcacatgcccagatgttacttgagtactttctgagcagccgcacatacaggtcagtgaattttttaggatgtaccatatcattgattcatgatcattgaactcagggccaacagtgctttaactcgtgcctacatgaagcttacttgacacatatttcctctgtaaggcgctttactgccttcttgagcttagaaacatgagacagcacctcagcaccacacagggggaccattttaaacaccagaatcactacagaaagcacagaaatacgaaaagcctggcaataaatggaccacaaaaaggacacttctttacaacctgatatctgaggctcaacctgaactgggaacttgggcaactcacatttttttgccaatctgcacatgtccacaaataaccacaaacagtgccccaattactgatttgggggttacaaattttagcaagtaggccagctttacaagtacagaattcatgaataatgaggatagactgcagactgtctaatcgtgcacgtgcgacaacgtgtggtgcaaactgccagggcgggacagagcagcgtgtgctgcaagaggtgaattctaactgtggagtaggacagagttagggtgggccaaacacacactagtcattaagccaacagagccgtgagaacagaaacagtgtctgttttgcacagtattgtatcccccacatctggaagaatacttgcagatacaggactcggtgaatggagaggcatggccatgaagtaggagaggatcttttgcagacagaataatcgggaaggcccctgcaagaaagcaaccactgagcccacccgaaatgaggaagcaagtcttgcagaaaactaggggagggggtgcatcccaggggagaggacaagctgagcccctgagggccagcagtggctggtgtggctgctgcggagaggatagagggcggcagggccagatcacagactgcaggagccacggaagggtgcctggggccaacccccatccccttgccgtgaatccttggcagccccttgttgggctcagccctagcaaagcaagggctctctctgcccctggcttccctgtgtttgaaggggtggagggtctccatccctccttgaggccttagctggtgcctatcttgtgctcagcactcacttgttttgtttacaacattgcttctgtttgttgtgctccaggcgctctgctggaaaagaaggtggacgtggacaagcgtgggctgggagtgaccgaccataatggaatggccgccaagcccctcggctgccgcccgccaatctccaaagagtcttccgtggaccgccccacctttcttgacaaggtatgaatataggtggtttgttgtttttgcttttttaacaagaggagtttttcatttcaactgtgtccttaatacaagccagattaaaaacttgctggactataatacttaagtgacttttatccatttttttctaacattatgaacatttaactcaaagaagggaatgtcgtatttcataagatgttactgagaatgaaaaagactgggattgaaaactgattttcatatttattgtgtgaacttggctggttatctgcttcaatttgtccaatgggcaagggtcatcaaatttccattttactatctcattttaaaaacacagatcttccctttggaaattacgtgttagatgtttatcctcaggaaaagggattggaagtggtggggcttgggcacccatctctggctggcccttgtcagttggccacatgagtgaccacagctggcatctgtggaaaacgccctgaatgtttagccagtccggtcacagctcagcccccagtgttgtcatgtaatgatgtccccatgccagactggtgtgactgcaaagcggagaaaagcattgcactaaattcaatgcaaatgtcgagccttgaaaataaaattgaagtaaggaaggacacattaaaaaaaaaagatcaacaatggaaggaggctgggtgcggtggctcactcctgtaatcccagcactttgggaggctgaggtgggtggatcacctgaggtcaggagatcgagaccagcctggccaacatggtgaaaccccgtctctactaaaaatacaagaattagcgagcatggtggcacacgcctgtgaacccagctactcgggaggctgaggcaggagaattgcttgaacccgggaggcggaggttgcagtaagctgagatcgtgccattgcactccagcctggacgagagagcgatactctgtctcaaaaaaaaaaagaaaaagaaaaaaaaaaaaggaaaggctcacaagcaaagaatatcagagatgggacttgatcttattttgagagtcctccagcacgtgatctgcctcagctgcagctgtggggtagcccagggtgaggctcacgtcttcatcctgcccctcgccagtggggactgagttcaaactcaggatgcccagtgaaattggaattacagataaataatttttgaaatcatactgtttaaactgataaaattactgttatctgaaattccaatgtgaaatcatactgtttaaactgataaaattactgttatctgaaattccaatgtaactcagcatcgcatatgtttatttgctaatctggcaaccctaaattgggaccctgacatttaaaatatggaataatgcacaggctggttgtgatgttagatgacataaatttgcaaaagacctggcacacagcatgacctcagtagatgttaaaaaaaaattaataaggttctgtcttttattagttctataactcaccctcttcttagattacaccctatgaaactgctgtgtttgtaggtcaaaaacaaatgtcatggaattcaacctaatgtacacctagagctttggtaataacttctcaaaaagaatctgtttatttgaaaatggttgtaaagtgcttgttgccatccttcctccgtgctcctacctgaggcagggccaatagttaggagaatagtagcagctaatatatgtgtttgtaaaatacttttaaactgaaaacagcatcttaatcctatttctttttctttttcccctcttccttttgcacatgttctccattcccttatccacacttttttgatctgttaattatttatccatccacgcctcctctgtttccttgggaaactgtttggtgctttgtctgctgatggacactgcacacagctcaccctttctttctccaatcaggatggcggcctcgtggaagagcccacgccttcaccgttcttgccttccccaagcctgaagctccccctttcacacagtgcactccccagtcaggccctgggtgggattgcctccgggctgggcatgcaaaacttgaattcttctagacaggtaaggctgtttggagagagcaaaacatggcctttgttttacctgccttctaaaaaatgtgtttgagacataaacttacttatttatagttaatacctctatttttaaatgtgactgaaaaagtagttgaaatactaccaggatttcccttcaggtgacttactggagtcaagagttgaagtaggaaatgctttagttatatttattcttacacttaactaaaacgtgtttgagctctcagcacccttggtgctaacttgggactggctaaagtgatgatgtgttgcacagtggtcttcggctgccggatgcatccagaggtccaggtagtgcccaccctctttcctcatggcaaccaaaacgacgttacatctgttgatctgcgagaaagcaccacattctccccctttttcccagaaataaagatgacatctcttgcaaggtggttctcaggagtcacactggcatttttttccaggcttcaaaagtctgtgggtacaggtggaaatcatctttctaaatcagttaactacaggaaggacctgagagtgttgtttgccacttcatctcacttttctcatatagactcttaacatgaaatgttgtaccaaaaaacatatcatcctttcccatccctaggacatcccttctctctgactttcttagggatgaggttgacacacacacacacaccgcttggagacatgtctctaagtagacactgtgaggtgtgggtggccaaacagcctctgtgtgcacattgtcccagtgttgttaccaatagtgccccttccactcaccagcgcccgactgtgtgatcctggcgatctgacattgcccccttggtggtggtgcagttttccattgttctgccagcttcaagtcagcagcccagctagggtgtgcactggggttaggttcacagctgttagctttgcagaaggggttctctcccagtgcctctcaggcggctgttcccaagtgaagctgtgcaataccttacctcacctatttgtcaggtaactcattacacagagtgaaaactacagctacaatatctttatcatagttaacacaaaattaactacctgaatttgtcagttcattccatttcaaggtttgttgaaataataactatatttcctgtttgaaatgttgctatcctctcagattagtaatcaccacacattattaccctttaatttttatcacatccttttggaaatgtatatttttcaaataaccatattcatgttgctgttgtgtgtgaaacattgtatgctggtagtttctttgaatggggtagccttcttgttgtataaacgacactcattaaaaattcacttggggccgaacgaggtggctcacgcctgtaatcctagcactttgggaggctgaggtgagtggatcccctgaggtcaggagtttgagaccagccaggacaacatggcaaaaccccgtctctactaaaaacacaaaaattcggggtggctcacacctgtaatcccaccactttgggaggccgaggcaggtggatcacaaggtcaggagttcaagaccagcttggccaacatggtgaaaccccgtctctactaaaaatacaaaaaatttagccgggtatggtggcaggcgacggtaatcccagctcctcgggagactgagacagagaattgcttgaacccaggggtagaggttgcagtgagctgagatcgcactactgcattccagcctgggtgacagagcaaaactccatctaaaaaaaaaaaaagccaggcatagtggcgggggtctgtaatcccagctactcgggaggctgaggcaggagaatcacttggacccaggaggcagaggctacagtgagccaagaccgcgctactgcactccagtctgggtgacagaacaagactctgtctcaaaaaaattctcttgggtacaagttgacagtggtaggaagtagaaacaattttgcattcacttgaaatagatcatttcaccctacctccaaacaatgttactctaatgcctgccttggtaacgtgtttaattctgtccctgtgcagataccgagtggcaatctgggtatgtttggcaatagtggagcagcacaagccaggaccatgcagcagccgccacagccaccagtgcagcctcttaactcttcccagcccagtctccgtgctcaagtgcctcagtttctatcccctcaggtcagacccacatccaagcaggactgagcaacaggatatagatgccagtgtttcgtggggtcctgtgttatctggaagtcactattttaaagtgagagcggagttaatccatgtttaagagaaggccttctggtttttaacctataaattaattttagactataaagtagtaaatggattctcctgacccaggagacattttcagagcttgctccttggaatgcctcagccaccgaaactagcatttggcatcttcctggtcagaagcaatattgagggggaaggacctgcccaacacactcccattgatgtgcttttgtcccagtctttgtcgagaaaattattcaggtgaacccagtgaactgtcctagattggtgggagaggaaagtgacacgctgtagtattgctgaggatgtaaaagaaacccttagaagcagccaaggactgaatcatgctttaatgagaaactaaatgtgatctcatataatagtgtatatattatagattttcagttatgtttaatattcagaattagatcatttttgccaatagagttgggttttttttctttctttcatcccttttcaggagtgaaccatagagattgttaagaaaaaaatgttgccgggcgcggcggctcacgcctgtaatcccagcactttgggaggccgaggtgggtggatcacctgaggtcaggagttcgagaccagcctggccaatatggcgaaaccccatctctactaaaaatacaaaattagccaggtgtggtggcgcatgcctgtgatcccagctacttgggaggctgaggcaggagaatcgcttgacccggggaggtggagattgcggtgagccaagatcacaccattgcactccagcctgggcaacaagagcggaaactccttctgaaaaaaagaaagaaaggaaaaaaggtcaaatcgaattaaggaaaaggatattgctgtttggcatggctctgaggcctaatatatatcaattgttcttgttaatattgtttatttttagcacattttacaattttaggctttggaccaagtttttaattacagtgttagttcttaccccttataatatatttgataatcaatggtattgataacatctttgctgcgtggggtaactcagggctctagttgatacgtaattctggtgtgaaggttgactggagccctgccctgagagagcagcagcatcttgaagtacttacaacattctagcattctagcagagagggaaaaaactgctttcttccccaagagacctctgatatcaagaagatagttaaaatttctgagggatcttatgttcaatctgttccaaaagagaacgtgttaattcatcaatcttctattattcataaaatttaatttaaatgtgtttagtttgttggaatatggtgtcttagtccatttgggctgctgtaacaaaataccttagactgggtcatttacaacagcatgaatgtattgcttgcagttctggaggctgagaagtccaagatcaaggtgccagaagattcagtgtctggtgagggcccgtttctcatagatggcaacttttatgcatcctcatgtggtggaaggggcaaacaggcttcctcaggcctctgtcattagggtgctgatccaattcatgggggctcctgatcacctcccaaaggcctccgctcttaacaccaccacaattagggtttgggtttcaacataggaattctcgggggacgcagacattcagaccatagcatatgggaaggcaatgctagcatacgaaaaagagcaggatgcactgggcactgcattgagggtaattctcgctctgtaattgttcaaacccaggtttgtgcactgagttgatagtgcacaattatcaatataactaatacatgtaactattatcaggcaataataaaagttattagataatagttaaatgtattcattaggatataggataagccaccataacaaagaggcctcaaaaaacagtagcttaaactaggtagacattgatctctctcaggttacagtgcagaaagaagcagtgcagggatcgggggtgactctgccatagccacttcccaggaacaggggaaaaggcagcactactgtgccggtggccttgaaattgtacacaccacttccagtcacatcccactgcccagacctaggccacagctgcacccagtctgagaggcagtagcagaagaagcagttagtcttccccacacaaagcaaaccagcatgtcccaaatggcaaggcatctgtgtgccgtctcactgtttcttctgtatctccctgttacctgtgagtactgataggaaggacacagaaccttggaaagttcatttataattaaaatatttggaggatgagatctctgaagactttccttcttccttccctcctttctttttcctttctttcttattctttacgtgctaactactaatgttaaaatgtccatacattttttaatggcctttgacatttcacccatgagacaaatataattattattgcaggatctggccagcagcctgcggtgcaacagggctctttctttgttcccaggcagattggcaggtcgagaaataaaagacacacacgagatagtgaaagctgggtccggggggtcaccgccttctgatcctgtgatgccaccaatgcactggatataccggcatttattactaagtttagtgagggcaggggtaggttagtgagggatttagggtcgtttgattatgaggtgagatgatcacatggggatgaagtaattctttaacataacatcggtatgcagaagtacagtatacagggataagaatttacaatatagtgtgtgcatcagcagtttctaacagagccttaaaacagaaacacagtctgtccataacctgtgtttagtaagatactaatcagtagtaataattgcagcaaaagctggttgcaaacaatcaatagaaacaggacatgaaactagataactgtttagaccacaaattctcagaagggagtatgccttaaccctaaagagacctagaagagctgtggcaagataagggcgtttgtaaccctatcttatccatatgaacaggcgcccctcatgcatccatttataggctctccccaagggtcgcattccattcccagagctatgaacatctgcttttctgggataggaatcttggtgatgtgaaacctccctgactgcacatccatttataggctctctgcagggggaagcacatcacgcgctgttggctcattctggcagcccaaccttgcattgtctttacacagtcctgcatgcaattttgtatttacaataatcaggagcatttcatcttttattccatagcagtagtttcagggggtctccctacaaattatcatttaatcatttttgaattttgaaaaactacaggtacaagtaactattttaacagagatacaacggctaatagtatattttatgttaaacaggttcaagcacagcttttgcagtttgcagcaaaaaacattggtctcaaccctgcactattaacctcgccaattaatcctcaacatatgacgatgttgaaccagctctatcagctgcagctggtgagtggatagacccatgcaagttagagcacgcaggccgagtgcagatgcacggcacctgctgagagcagcagttgtgataatgtttgtcttcacgtcagggatgtcattgagactctcatgaagtatttaaactcttcatgagttagggagttctcactcaaaggtgtcctactaggttttgtaaatgttttggcctctttgtttttgtttttgtttagaggcagcatcttactatgttgccaggctggtctggaactcctggactcaagggatcctcccacctcagccacctgagtagctgagacaccacgggtgtgcaccactgcacatggcttggcctctttgtgttcagaaaatctaccaatctaccagattttataattaggcatgtcttttcagttgagctctcagccagagtttctgagaaccacagaacacaaaaaatcatttgagtgactattttctcagttattctaaggatggtatacataaatactattctagaagcacaggagaaaaattgctttattacatatagtagatgccttagagcattagaacttaattctctcatgaaaccccggtcaagaatggctgatgtgacctaataattcttgaaagttttgtagcttcacataatcttgatttttttttaattttcaatcagtcttactgattttactataattgccatgtcattgtatacctagatgcttactgaaattatatacactaaaagacccagttaattatttcattctttaatgtgggtatctgatttatttagcaatcttagccagcaacttcatcacctagaaaatgaccaggaatcggccgggcacggtggctcatgcctataatcccagcattttgggaggcccaggcgggtggatcacctgaggtcaggagttcgagattagtctggccaacatggtgaaaccccgtctctactaaaaatacaaaaattagccgggcatgatggcgcatgtctgtaatcccagctattcgggaggctgaggcaggagaatcgcttgaacctggaaggcggaggttgcagtgagcctcgcacctttgcactccagcctgggcgacagagcaagactccgtctcaagaaaaaaaaaaaagaaaatcatgaccaggaatcatgaaggagaaaaaaaaaaaaaaaagaatgggaactccaaaagacagaaccattggcataaaacctttgctaatgagagagtacctcagccctcagtctttcccctttgctgttttttagacacatgtccaacaagtttgaggtctgcttttctgtaagcagcaggggaggatagaaggaaggagggaaggacgtgtcccagagacacatgctatgtgtcctcgctttaatggaaagcacagagctctagacatgaggtcaggaccaaggcttggccctcagagactgttttttctttttctttttcttttttttttttttttgagacggcgtcttgctagtcttgctctgttgcccaggctggagtgcagtggcacgatcatggctcactgcagcctctgccttgtgggttcaagcaattctcctgtctcagcctcccgagtagctgggattacaggcgcccgccaccacgcccagctaatttttgtatttttagtagagacagggtttcaccatgttggtcaggctgctggtctccaactccttacctcaggtgatcctcccgcctcagactcccaaagtgctgggattacaggcgtgagccactgcgcctggccagagactgtttttccatctgtcagaagggaggtggtgctgtagtgaggaatcgctgtggggaggcagtgcacatgtgcagtcctattgctttcagtcctgcccgccggagaccactgacctccaaaggaaaggagacagctctgaaaacaggcactcatagaaaaagcatgcaggtttagagctgttactgtagaggaagatcgctttctgccactagatgacgctgcaggcattgctgcagccctgacacagagctgattatcttactgatgtgctagaatcttttagttatacagtaagtttttattgacctctatagtgtgaaagacatcaagaaaatgttgaattaccaatagggtgttctaattttaaaacaatgtattctgttcttaaatttttttccagaaaaattggaaaaataaagtttcagtgcttccataaggttaagttttaggcctataaggattcacttaagtggggtattttattcctccatgattacagatgaaggaggcatttctaatagtataatctccacctttatttggattctactttgatgagtcttgccaaaaatgtccctaaaattcatgttgtaagaaaaaaaatcatgatattcaaccaacatttcaaaacagtcaaatgaccaaagcttctatgtcagtgtacagaagaatatcatcataactttaaccaactttgtagatgacaagtttgtgtgacaaaagtgcccacaaatctgcatttcaggttctctcttagctttcattcccatgatgttagggagataaccacgttgtttaacacacattattattgaatgatttgggacagttactaccagtgtttcacattgtctgggctgtcctggacttcagtctccatcattatagaataggttggttttttgttttttttttttaagtttcagtttgtatgaatcaagcagaagaattttgatttcttcattaaatgaaaaatatttgctgaccaacatcatcaccaacactaaacaggtattgactctgtgattttttttagttctgcgcactaaaaaagtggataagacattaatcttttaaaagtgctctgtgcctccagaatatgtgtcagccatggctgggcgccgtggctcatgcctgtaatcccagcactttgggaggctgaggcaggcagatcacgaagtcagtagtttgagaccagcctggccaacataatgaaaccccgtctctactaaaaatacaaaaattagctgggcgtggtggcacacgactgcaatcccagctactcgggaggctgaggcaggagaattgcttgaacccgggaggcagaggtggcagtgagctgagatcacgccattacactccagcctggatgacagagcgagactccatctaaaaaaaaaaaaaaaaaaaaaaaaaaaaaaaacagtatgtgtcagccacagtatgggccaagaagagtggctaggttctctttttttattttttaactaatgtcagaaagttgaaccattagttcaacttacacttaattatcatactattttaactcttcgttctgtcaacaggcataccaacgtttacaaatccagcagcagatgttacaggcccagcgtaatgtgtccggatccatgagacaacaggagcagcaagtaggtgctacccagattgatttttgtcatgagctataattttccctgatagaagagacgctaattgatgaactattagatgatcattgatttttctctagccaagccttcctttgaaaattcctgggttcagctaggtttgggaggaggttggcctagccagtagtggcctcagcataaagacaatgaagaatgcatttggtccctagacaagccatgagtgtcccttcccacctagttaacgcacctatgtctctgcctgccaggttgcgcgcacaatcactaatctgcagcagcagatccagcagcaccagcgccagctggcccaggccctgctcgtgaagcagccaccaccgccaccgcccccgccgcacctgtctctgcacccctctgcaggcaaatcggccatggacagcttcccctcgcacccacagactcccggcctacctgacctgcagaccaaagagcagcagtcttcacccaacacctttgctccttaccctctcggtgagtgtcccatggtcttcaacagccacatcaggtagagagggtacctggagtccgtatgtggtagccagggcagcatttcagtggttaggaggactggccagcgctgaaaccatagcctgttggaaatgcagccccagacaaaatcggagagcaggtatctcaaggctttttaattttaaaaaaattttttaattatttttttgagagatgggggtctcaccatgttgctcaggctggtcttgaactcctgggctcaagcaatcctcccacctcagcctcttaaagtgctgggtttataggtgtgagccaccatgcccagcctcaaggatttgtaataagggaacaacactaaccacgttgtatagagcaggagttttgccgctgccaataatactctcagtataaaacctttaaaggtagtaccagtcagagcccccaaaatctcatttccattgtcaaatctccaaagtttgttctgttcctagtctactctgaactgtactttaccagccactgtcctccagcctaaaccacagagaagactttataatggtttggtcagtaaaagtattcagatttacattaaaagcacttcttaaaaagcagtggttgttgatacaactcattttgtatgaaatgtgatttgtataatcgaccaaatcaacatatatatgttgaaatctaacttgtagaagcacactcagcacttgaaacccgcaggtcagtagaagacatggtgccaggcctcgaggtcaggccagtcaggagagacacagctcacatacctgaagacaccagagggtataaattagtaaattgattctgcatggactaatttgccgtaagaattcagaagttagtgaaagcactttaggcttgtctgttgattgctattagagtctgtagatacaggacaaagggttatcggtaacttggaaaatacatctgtaaaggggcaaaggccagttgagtggtagtgaatttgctgccagcagataatattcatttatctaattctattcaatgtctctgaaaagagcggtatattgtaatcatatgaatcctttttacttgacatattataaatgtggtatatctttaatatgagattgataaatactagactagatgatctcgttccttaattattgtctcatccattagagccctttgtgtcgaagtaggtaagacctgacttaggaattagactccctaggtttgagtcccaactcaccaccaagaggctcactactaacttgggcaacttgcctagctgctgtttgcttcaatttctttatttttctttcttttttttttggtagagacagggtctttctatgttgcccaggcaagtctcaaaactcctggcctcaagtgatcctccctaagtgttaggattacaggcctgagacaccatactgagccatgccttaatttcttcatctgtaatgtggaaatacttaactcctaggtttgttttaaagattaaatgagctaatatgtaaagttctcttttttcttttttttttctctctctttttttttttggctggagtgcagtggcgtgatcatagctcattgcagcctcaaactcctggccttaagtgatcctgctggtctcagcttcccaaagtgctgtgattacaggcatgagccatcacacctggcctaatatgtaaagttcttaaatagtgcctagcacatagcaaacactttgtaaaatgtcagctacttatgtaagtgcttctgttttagaaacaaatttcatcccacctattatcctaaaatgcattagcttcagctttctattattcacctgtcttcttaacctatatttggaggataaagtacacttatcgttacttttttttttttttttttttttttttgagatagagtcttgctctgttgcccaggctggagtgcgatggcgcagtctcggctcactgcaacctccaccttctggattcaagcaattctcctgcctcagcctcccaaattgatgggattacaggcatgcatcaccacgcctggctaatttttgtatttttagtagagactgggtttcaccatgttggccaggctggtctcaaactcctgacctcaagtgatccgctcacctaagcctcccaaagtgttgggattacaggcgtgagccaccgtgcccgaccacttatctttactcttaaggattttttctcttagtacaagttaaagaattcatgcagtgaatctttgaaattagttgaaaaataatttggataatattttataatattcacagtaaagttataaatgtattaaaagcaaataactaataaagtctaggaaactttggttgtaaaattgcctatcttgttggctctcagcatttctctgcagcagcacctatgttgaagagcctgttagacactcatcaattcatgtaaagaaaccagcagcccatggtcagtagtgggggctcctagctaccttccttccctcatgttcagcctgtcgttgttattctcagtcttttgccacctggagttcgccatctagataggaagagcaggcatataaatgggaaaaaataaccttgataccagtgtcatgtgattcttacagggctctagagaaggaaaagttcactttcactttgagtggtgaaagaaaaatcagagagtaggattaagcttgaacctcaaatgattggataggattacagtaaataaagaggaagcctttccaaataaaggggaagcctcacgtagcacagaagaaagaggcctggcttgtttcaggggcccattttgcaagggccaggccagtctagctgactttcccagaggggaaagttgggagagatgggttggcgccaaattgtgaaatttggagcattctgaaggccaggttgaagccctgacattgttgccaccttacctggctagatctgtacaagctgaaacgaaaagaacccacacagcagagattgcaagtaggcagccctgtggcactgatgggcttgcaaaggcgttttgttaggtctgcgaagtgtgtgtgtgcatgtgcataggtgtgtgttaatgccaacattcaaaaattggggaaagtggcttctggcttctcttaaaaatggctatagtgggtctatgttccaggtagcaataggtggttggccccagtagcacctgtttatttagacaggacagacactctctggtttgccacagtccccatgaagcccacttcttcatgtgcatggcccacctggctcctatgggcatttgaatttgcagcctctgaaataaaggtaagaaccagaatgttcagcacctggctaagtagtagaggctcactgtgcttacgtaccgtgtggcgtagtacttacggtaaggacctatggggtatgtgtatgtggtaaggggaactgcagctggaaatacaaggggaggggggcgcttgtgctggttattcccttccaaacaagcagtctgtcctgctccaaactagtgtcctcatcagaaactctttacttcaaccttcttttcattgtcctcctcatcatctttctttattaacctagcttagtgcaggtcctggacaaataaccaggtacctgcttttagctataaggaatgagcccagaagcctcagctcaccatcccagctgggggcagatggcagcacccccgctgtcaaatagttcagttccttaaaagtagtttgatacttaattcacagactctttcagagcagacttttgtaaaggaaactcactaaaggtagaactgaattatcctatcagtctgtttcataggtggtactttagagttctggaaaagtgtttttgacctgatgagtttccgtaagatatcccaaaacaaagaaagattttcctaatagtttggactttttctattttcctgtggactctgagaagcctcaggaccatgtttattcagcactgaaacaagtaaaatgaagagaattgtgggccttacttaatcaaagactattcacattttcaccttaatttaggaataatattcctagaaatacatgttgttatgacgataagtagtattttttcaccagcactaaaagttatagttaaaatattttgctgtatcccagctacttgggaggctgaggcaggagaatcgcttgaacctgggaggcggaggttgcaatgagccaagattgtgccattgcactccagcctgggcatcaagagcaagactccgtctcaaaaaaaaaaaaaaatttgctgtaagcgaagactgaaatagcttctataggagagctttagaatgaagtcatttagaggagcaggcgaatcctaaccgcatctctctctttagctggactgaacccaaacatgaatgtcaacagcatggacatgaccggtggcttgtcggtgaaggacccatcccagtcccagtcacgcctcccccagtggacgcaccccaactccatggataacttgcccagtgccgcttcccccctggagcagaaccctagcaagcatggtacgtctgagctaggatgcctgtggtgggatcactgctggcttattaatcgatcgtcctgttgtatagcatggccattctatacttttctaagaattgagcactgaaagttggatttaaaataacccattccattatagtgcatataagatctcagctagtcactgatcaaacttcttaaaacccaaccattagatcttagctacaaacttagaaataatttgaaaaccccagagcagcaaagaatctaggtcatagcctgtgtactttttttatgtatctatattcatcaacaaaaacttgagtctgctgaaatgttttcaataaaatggtaaaacataaatagaaaatcaaatatacagtatgtatgggaactgcagctgtaaatactagggtgcatttctgttggttattcccctccatccaagcagtctgtcttactccaaactggtgtccccatcgggaactctttactgatggacacacgagtaaggtggaagcaaaaatgataaccataggaggtaatctcactctcaagcattaaatttaactctgaacttcctggtagaataaacagcaaaggaaattcagtaggttacgtagttctctcttgataggaagcattctaaaaagaaaaaggaaactatgtctcatggttaacttacggaaaatcatcacacactgctggcacctttcttagcaggagggctctgctgcctgtagctggttggtttggttctgtatgaatttttaacatccactgtgttcttccgtagtgagggtttcagactaaaaggagggaagagataacagcaaatttgatagctaatcacaaagactcataagttgtccccaaaaagatttattaagggcagcttcccatggtatggatatgtattttgtaaagacttcttactggacaaactgaaattgttcttcaagggtttcaatctttcagggctgaaattgtagctaactgaaacagtcactggccaggcatggtggctcacacctgtagttccagctacttgggaggccaaggtgggaggatcgcttgagcccaggaggttgagccctgatcacatcactacactccagcctgggccacagagtgagaagttgtctcaaaaaaataaataaataaataaataaagtcattgattcttacagaatcctagacagaccaagtcttacaattcatgtaactgaatagggcaaggcattggacctagaacagaaggtacatagggaggcttagggtatcttctggtgtctctcaactggagagtattcactcgcttctttgtttcctattgtccccataggtgctatccctggaggtctaagcattgggcctccaggtaagtcctccattgatgactcctatggccggtacgatttaatccagaacagtgagtcaccagccagtcctcccgtagctgttccccatagctggtcacgtgccaaatctgacagtgataaaatctcaaatggctctagcatcaactggcccccaggtaagaccatgcaacacttctgtgcaacagcagcaggtcagaatgtgctccaagcctgcagagagtgattaggctgagaggacccagaatctgagctaaggatctggaagcgttaagcccagagctttggcattttccttggaaatccatttgtcagatcaattttgggtatggttagcatcaggcatttttctgtaaacccttagttcagcatgaggagtggaaggggtggcagggaggaagcacactgcacactatccggtaaaactattccaaccctgtgtgaaaactagcttaatatgatagctgtgatacctggttctagtttgttccaaaggattgattgctttaatgaaagagagtataaggtgtacctctaatttaattagcagattataaaaatttctacaaacaggacaaaacatcttttaaaatttcgtgaatcaatgtgccggtgttctgatctgtggcttctcattttggtttcttaaacagaattccatccgggagttccatggaaaggactgcagaatattgaccctgagaatgaccctgacgtcactcctggcagtgtccccactgggcctaccatcaacaccaccatccaggatgtcaaccgctacctcctcaagagtggaggtgagggtgctgctcttcctgcctctgcatggacggtctctctagacccatttggagatgtcaggggtgacaggttgggctgtgaggcagggatgatacaaggcacagttggcgggcaccttttctagtcacctgaagcagcatgaaaagacagcaggtagtgcttatggagaaatggaaatcaatttgagtttctgctggattttttattattattactttttttttttttttgcgatgaagtctcactctgtcgcccaggatggagtgcagtggcatgatctcagctctctgcaatctccaccttctgggttcaagcgactctcctgcctcagcctcccaagtagctggaattacaggcatgtgtgccaccataccaagctaatttttgtatttttagtagagacagggttttgccatgttggccaggctggtctcgaactcctgacctcaggtgtcgcccatgctgctggatttattgataagtaatgtcttatcatagaagtgccatctctgataaagttttatcacagcatgctattttgtggaaggaagagctagattgccataggtactatcactaataaggccacctagatagttcccaaaacattgaatttcccacttgaaatatgactcattggagccatgtgttttgtgtttgcttcttttgtttcttttttttttttttttgagacagattctcgctctcttgcccaggctggagtatagtggcgtgatcttggctcactgcaacctccgcctcgcaggctcaagtgattctcatgcctcagcctcccgattagctgggactacaggcgtgcaccaccacacccagctaattttttctatttttagtagagatggggtttcaccatgtttgccaggctgatctcgaactcctgacctcaagtgatccgcctgctttggcctcccaaagtgctgggattacaggcgtgagccagtgtgcctggctgcttctgtggttctttaaagtgataggcttctaaatgtgcctgtggtttggctggaaagccaacataagtacagattgccctttctgtttaatgctgtgtattccttggggttacacagctgctttttggatgcagctgcgtttcggaacagggatgttacgggtgtccctgctgtcagacacagccaagtggtgcaggaaaaggagccgtgtaagatggcagaggacaggtgaggcgccagccagaatcagagacccagccctccccgcttgtcacacctggtggggcaccagggttgtgccagacaggaaaattagcatattttgagggatgtggagaagtgggatgcaggttgtacagatccaagtcataagggaagttggaaagaatcgaagttgcatggcagagcttcccgagtggtgcccagatgaagcatcaggtagccccttagcctccaggcagaaccagggccactgggagtggcctcagccatcgcctgagtgtgccatggtgtgaagaagatggcccgagaaacacgtgacagctgtcctcaagctccacatgcagctgtcctccagctccatagcctgcccagttaaggagatcaacttgcggggagggcagaagagaacctaagcctaggaaatgcattggcctttgagataaggcaaggaaatggcatctccagccctgagcctaagaaccagccagccagccaacctgccaaccggggtgacttgtagctccaagtgaacatcgtttgacttcccgggtgctcgacgtttgggtcttgagcctgccctggcacttgtacacagacatcagtattcagcagtagccagttcatgtggctcatgccaggcctccccttcagctcgtgaccagcacgaggaaccttgttgctccactctggtacctctcttggttgtgtttagggatacattagggtttgttattgaaagaaaggggagtacaatgaacatctcttcacgtagaaattgctaaccagaaagcactagcaggccgagcacagtggcttacacctgtaatcccagcactttgggtggccaacgtgggagaatcacttgaggccaggaatttgaaaccagcctgggcaatataatgagaccctggctctacaaaaaattaaaaatgaaaaaattagctgcgtgtggtggcacacgtcagtggtcccagctactcaggaggctgagacaggagaatcacttgaccttgggaggtcaaggctgcagtgagctgtgattgggccactgcactccagcctgggtgacagagcaagacttcgtctcaaaaaaagaaaaggcctcccaaagcgctgggattacatgcgtgagccagtgcgcacggccgagctgacacccttttaaagtaaagaccttcttgagggaattaacacaggaacagagaacagacagctcacacgttcccacttacaaacgggagcccaacaccgagttcacacaacacaaagaagggagcagcagacaccggggcctgctgtatggtagagggtgggaggaaggagaggattcagaaactgcctgtggggtactgtgctcactacctaggtgatggaatgatctctacaccacacccccacgacgcacagttcacctgtgtgacaaacctgcacatggactccctgaacccaaaataaaaattggaaaaaataaaagtgaagacctgcagattacccataaatgttaacttgcctcagctctggtgccctcattctaaagaggtcccttgcagcagggcagctgcaaacagctgtgcaggttggacactgcacgtgtccaggaggtgccacacacctggttattcactgcacaacgccatgtgggcctacggctgagatgccatggcttttcagaaaccgtccgattctgtttatggtcatcagtttagcagccagactgtgctcatgttccctctgctagccaggatacgtgcactggcagagtcattgtcccaattagagctctttccatcctgtgttcaccccaactgtcaccattattccatcctcgctcttcttctccagcttcttgctttcttcacagaattgaaagggagagccacattagaaaatatgaaataaaaccaagcagcgaggagctgagcttttacacaagggattgaggtgccttaaggatggcccatttatcctaagtctccctttcaggcacagggacaagctttcctcaaaaaactacagtcctagggatagaataactcaagtccatatacacagttattaggacagatgtctcttaattattcctgtatttaaaaagggaatcatgagccgggtgtggtggcatgcacctgtggtccctgtgactccggaggctgaggcaagaggatcactgagcccaggaggttgaggctgctgtgcactgtgatcatgcctgtgaacagccactgtgctgcagcctgggtgacattgcaacagccccatctcttaaaaaaaaattttttttaagcaaaatatgagtgtaagctgatgggacaccccagtcagaagaaatactcaaatttttatggcaaattttgtaataaaaggcttggagttttgttcttccattttgtggccattgtttgaactgtgaaaggatgtagattgccctggatttttattttaccttatttgggagaggaaatcagtgtggtcctttaaaactcttaaaacatggtattttaagcattctggcgggaattctcaaagaagctcatgctgcttcttgccctttgattcctctgccttcagcaacatcccaggcctccctgagtgggtacagggacccagagtaggaggcatgccccgtttcttctttcccacatgtcactttcatgttcaggcttctattaaaaatggcagcctagggagaggttgattcctgatggttctcacaccccacagttagagtcatgaacccggacaccgccaccaccttgctcagtgccgtgtttggttctgcagggtcctccccgccatcatctcagaatgccacgctgccttcttcgagtgcctggccactcagtgcctccggctacagtagctctttcagcagcattgcatccgcacctagtgttgcaggtacgcgcctggcctctagacttgcaggtagcattttctttcttttcccaaacaaaactttgacaggccccagcttttcctattggctctttactcactccctgagctgggaggccgtgtggcgtgatgaaggatgggtgggggccttgcccaggcacagtgggcacgctgggcacatcagcttgcacgcacatggaagtggtaacgtcttctccatacaagtgtgtgggcccactgccttctctcttcctttcccccatggccacaagacaagggctctgcaaggttttgaaaacttagaggcaaaacacttctgggaatttgtggttacttgagtttgccaggggcttgacttggtgtttctttgcctatcacacagtctgctggtgttagagagcactctgtgtggctccccaaacacagcagtgagttttcttctttgtctcaagactgcatatgctccatctctctgcctttctaggtaaactgtcagacatcaaatcgacgtggtcctctggccctacctcccacacgcaagcctctctgtctcatgaactatggaaggtgcccagaaacagtactgcacccacgaggccacctccagggttaaccaatcccaagccctcctccacctggggtgccagccccctcggctggaccagctcctactcctcgggtaagctccatgctcctcgtgttccgatgggggccttaccctttaggggatgtgcttatcactttgtcctgtacctcctttgtaaggacccctgcctgtaactctggagcctgggagggcttaggagggcaccagggccaccctagatgtccatccagggcagtagctgggtgagcctggtgtttttagcatcagcctaggtgtgccggcacgcagcaggtttgctctgggccaagaggtcccaggcagttccagcacccattgagggcccacactggccaattctatcctcaggagtgtggctgccccacactgggccatcagaggcctgcacagcgctttaggctctctgcccccatgactccccttcgcacagggatctggatttctgctttttatatttgcttctccacaagatgtcactgggacgtaaggcttttgcaggcccaaaacaaaacaaaccccaccagtttgaaaaaacaactctcataatattgcagcttctctcaggtgctgcatgtcgaacctcagagatgaaagaaatgtactgggaatttaggaaactgaagatttacaccagcgtgggcaacaaagtgagaccccatctccacaaaaaataaattagtggggcatagtggcacatacctgtgatcccaactgctggggaggctgagacaggaggatggctcaagcccaggagattgaggctacagtgagctatgcttgagccactgcactccagcctgggtgtaataataataaataacaaaatttttaaaatcagctacagatagtgtattagtccattttcacactgctgatgaagacatacccgagactgggcaatttataaaagaatgagatttattggacttacagttccatgtgtctggggaggcctcacaatcctggtagaaggtgaaaggcatgtctcacatggcagcagacaagaagagagagagagcttgtgcagggaaactcccatttttaaaaccatcagctctcatgagacttactcactatcacgagaacagcatggaaaagacctgcccccatgattcagttaacctcccactgggttccttcacgaaacatgggaattgtgggagttacaattcaagatgagatttgggtggggacacagccaaaccatatcattctgcccctgacccctcccaaatctcatgtcctcacatttcaaaaccaatcatgccttcccagcagtcccctaaagtcttaactcatttcagcattaactcagaagtccacagtccaaagtctcatctgaggtaaggcaagtcccttccacctacaagcctgtaaaatcaaaagcaacttagttacttcctagatacaatgggggtacaggcattgggtaaatacagtcattccaaatgggagaaattggccaaaacagaggggctcaggccccatgcaagaccaaaatccagcagggcagtcaaatctcaaagctccaaaatgatctttgacttcatatctcgcatctgggtcatgcttaggcaagaggttggttaccatggtcttgggcagctctgcagggtacagcctccctcttggctgtcttcacgggctggtattgtctgcagcttttccaggcacacggtgcaagctgtcagtggatctaccattctggggtctagaggacggtgaccttcttctcatagctctactaggtggtgccccagtagggactttgtgtgggggctccaaccccacatttcccttccacactgccctagcagaggttgtccatgagagccctgccccacagcaaagtattgtctgaacatccaggcatttccgtatatcctctgaaatctaggtggaggttcccaaacctcagttcttcacttctgtgcacccagagtctcaacaccacgtggaagctgccaaggcttggagattgctccctctgaagccatggcccaaactgtaccttggcccctttcagtcacaactggagcggctgggacacaaggcaccaaattcctaaactgcacacagcatgtggaccctgggcctggcccatgaagccattttttccttgtaggcctctgggcctgtgatgggaggggcttctctgaagacctctgacatgctctagagacagtctccattttccccattgtcttagggattaacatgcagctcctcgttacttaggcaaatttctgcacccagcttgaatttttcctcagaaaatgggatttccttttttttttttttttttttttgagatggagtttcactcttgtcacccaggccggagtacagtggcgtgatctcggctcactgcaacctctgcctcccaggttcaagtgattctcctgtctcagcctcccgagtagctgggactacaggtgcctgccaccatgcccagctaatttttgtatttttagtagagatggggtttccccatgttggccaggctggtctcaaactcctgacctcccgtaatccacccatctcagcctcccaaaatgctgggattacaggcgtgagccaccgtgcctggccaattttctgaactttcatgttcgactttccttataaaacggaatgcttttagcagcacccaagtcacctcttgaaggctttgctgcttagaaatttcttctgccagataccctcaatcatccctctcaagttgaaagctccacaaatctctagggcaggggcaaaatgccgccagtctctttgctaaaacaacaagagccacctttgccccagttcccaacaagttcctcatttccatctgagaccgctgcagcctggactttattgtccatatccttatcagcaatttgtcaaagccatttcacaagtctctaggaagttccaaactttcccacattctcccgtctatttctgagccttgagttccaacctctgcctgttacccagttccaaagttgcttccgtgccaagaccagcttgatcagggagaccctaacccagaggcactagaggaattaaagacacacacacagaaatagagcggtgtgaagtgggaaatcgggggtctcacagccttcagagctgagagccctaaacagagatttacccacgtatttattaacagcaagtcagtcattagcattgtttccgtagatactagattaactacaagtatcccttatgggagataaagggatgggtttggctagttatctgcaacaggagcatatccttaaggcacagatcgctcgtgctactgtttgtggtttaagaacgcctttaagcagtcttccgccctgggtgggcctggtgttccttgccctcattccggtacacccacaaccttccagcatgggcgtcatggccatcatgaacatgtcacagtgctgcagagagttttttttatggccagttttggggccagtttaatggccagattttggggtgggggtgggaatcacgggagttacaattcaagatgagatttggatggggacacagccaaaccgtatcagatagttggaaagtaatggtttctgccttttagcggcagccttcagggatttgctctgttgtattaaccagaagaacctgggagcactgattccacaccgggtctggggacaggcagaggtggagagcagagcttccctggagattctcgggcctcatcacccccgtctctcctggcacagatgggaaaacacaggcctcccgggctggtgggaagatccaaaaagtcagagtcaccacggggaagtgggaagggggtctgcagggactgtgaggttttggtttaccaaagatagcatgggcctcccaggctgagaaaggctttcctaaagcacgcagtgacggcctgtgctgtcccacacttcagcacaataagaagtggggagggccgcactatccactggcacggggccttgtcaaccaggttctcccctcttgttgcaggttctgcctggagcaccgacacctcaggaagaaccagcagctggctcgttcttcgaaacctcactccccaggtgcaatatggtgcccctgcatcactgagcatgatccagggagggttcccgcttggcccccaatgcagatgaggctgtctggtggggcaggatagttgggggttcttggtcagggtccataagtgacgctgcatgggaggagatgagcaagtgccaggattggctccagcagcggcagcagatggggcccaggggcctcttttaaccatgttcctggtgaattgtttgtttccccaccagaggctggaaaagtgtgctctgtaaatagaattgtttattttacaactagccattcaagagtggttgggcctggctgggcgcagtagctcatgcctgtaatcccagcactttgggaggccgaggccagggatcacctgagcccaagagttggagaccagcctgggcaacatagcaagaccccatgtgtgtatttttataacattttttaaaagagtcgtttggccacatcagactgtggggctagccagtcccttcccgggacccaggccacacccacctgcacgtctcccaagtctgttgtcagcagctggacccaggtgccttttgcaaaccagaggctctgtgcgacgtgctctggtgaaaggagagcagaattcaaaatggggtttttctccttcctctgattagcctaacttataaaatgtaactgaagcatccaagtttttagttacacgtttggccacagagatataaaacgttaatgttgtaaaaccacatattattaggccttttaaagaaaaacattcctagtgtttagtgtatccaatttcatacgttttttctttggaaggctgtagtgaaagaaatcagaagaaagctcattcatgtccctgtgcttcctctatcagattgatggttctacactgcggacattgtgtttgcaacatgggcctcttatcacattccacctgaatctgactcaaggcaatgctgtggtccggtacagctccaaggaggaggctgccaaggcccagaagtctctgcacatgtatgttttctcacagccacctcagcgctccaagtagctccccatcccccagagcattaggttaggggtgttgcaggggtgtcctgagccaccatagcagaatcccacaggctggccaccctcccacttctggaggctggaagtctgatacccaagatgaaggtgtgggcagggctggtttctcctgaggcctctctccttggctgtagacagctgccttctccctctgttcttatatggtcgtctctttgtgcatgtctgtgccgtaatctctccttataaggacaccagtcctgttggactagggcctacccatgtgacctcatctaactaacttaattcccgccttaaagaccccatctccaaacgtagtcacatggggaggtactgggtgttaggacttcaacaaaggaattggggaaaggcgacacaggtcagttcctcacaggtatcttgggacttactggtttttttctgctgctgagttgctgtgtctactccctccctgtgacacattcctacacagggcccagcagtggtcctcacagccaacccttcaccctagtgaaaggttgcttttgatagaagtacgagtagacctgatcagtaacatcacttgagacgttggaacctagaaattagtcattcctgtttttagcccaggatgcaaatgacactgaccctaaacgagcccacatttaatgatctgttcacgcacttgaagatgtactctgtgtaccagtacgatgttgccactagaagtctgaactgagcaaaacattcacagtctgggtttggaaatagcagtggcaaaacagaagccacaggatggcttccatgtggggccgttcccaatacagagaaagccagtgccacgaactcagcaggacttggggtggccctgttcacgtgccccatcttgctgttgcaggtgcgtcctgggaaacactaccatcctggccgagttcgctggtgaagaagaagtgaatcgcttcttagcccaaggccaggcgctgccacccacttccagctggcagtccagcagcgcgtccagccagccgcggctcagcgcagcgggcagctcccatggcctggtacgcagcgacgctggccactggaacgccccgtgcctgggtggcaaggggagcagtgagctgctgtggggcggggtgccccagtactccagcagcctgtggggcccgcccagcgccgacgacagcagggtgataggcagccccacgccgctaaccaccctgctgcctggggacctgctcagcggggagtccctgtaggctctgccatcatcagcaccaggagagccgacccctcccgggacccctcccggctgggcggccccacagacccgctggaacccagcagcggccgcccttttgagtacctctgtccaggactgaagacgaaccttggccgcagtccttgcgaactgttcgcaaaacagtgcgggctgcggtgggtcagcgtcacatgctaatgacaggatgttcctcgtagctttttattttgtgcgtcttatgtttgtatagtgtgttgtcattttgattttttttttttttttaagtataaaagctgcttagaatagttctatcatgaagggcacttttcagattgtgggctggaaagggttattttatctgtgggggagggagggagacgtgaagcctatttaaaatgagcctgtgacgattatgcacatgaccagaggcggccggtaatcagggcagagtctggtgtggaccgccgggcgcagagcggctccgcggcgggagctgagcggaaggcgcgggctgcgatctgctctctgttcccctggatccgcctatgcacattacccttgtttcattactttttcatgtcatttttttatcccaaaaaatattttttaaaagttaaaaaaagacatatcaaacatgcaaatacttgaatccagcaggccaatagtgaaatgtgaacactttctaattctacacttccaggttgacatcagtacacagaaacaggctctaggaaaaatttctaagttcatagcctacgtgtgtgtatgtgtgcgtgttgaaacagaagtgtgtgtgtgtgtgcatgtgtggcgcgtgctcctgcacggcgtgcagttttctgtgtttgtgtgtttgaaagcgtgtgaggatttaactgtgggttttcccttgtattcagtatacgctttttttttggcgcattggtcaaacggttgttattattagcttctaactttgcactgagtgtcctcgcccttcctttagctaatcctatacattacagagaattcctaggacagggctggcgacaattcatgtgtaaatgtttactcaaggactctgtgactgcgtttaaaaagtacagtgtatatctctggagaaataacatgtatacctacctttagcagctttttattgtggactaatgcaagaaaattattaccagagtattgcaccatttttccatttggaatataaagttaaagagaaaaaaaaaaaaaactgttgttgaactgtggccatagatacttgtaaagaatggatggttccgtggaaggaacagaaacaagcacttgggcgtgggttgtgactgcttttgggggagcctggggtttgggctcccacctgtttacagacctttttttctccttcagactttaaaattttaaaaatttaaaaaggaattaaaaaaaaaaaaagacttccgtcgtaaagaaacctattttcagaatgcagatgcgttccttcagagctctgggacgggacagtgttgttccctcggccatcgtcgtggactctgtcgattgctttcgccccttcgtcaaggtgacaggcgttgtggccactgtcttgcacatgccggacgcgctctcaggaaagccagggctcccgagggcagctccacaccatttcatgtatttttaaacccaactcctagcactgaagatgttatttaaaaaaaaaaaaaacaaaacaaaacaaaaaaatgaaaaaaaagaaaaagaggaaaaaaaaacacaaagaagaaaaatacctaatctctaatgtgtagcagttacatatttaccaaataatggactcaaaagaaatagatgtttgaagagtgctttatatattaaaaattgctttatgttttaaaaatgatcaatgttttgattgttttgcaaggaagaaagacaatggaataacataccttcaagtatgttttaaaaaatatatatatgaacattgtgctccctgcctgcttgatcaggaaacttgtgcattacatttttttaattagctttttaatggttttatcaaaacaaaaaaaatacaaaaaaaaaaaaaaaagtcctgcaagactgcagatccacaaaagctggttttatagaggatcatgaactatgcacaaactgggttcaagactttttttctcaagtttagtaggatatttagaaaaaccaaccttcctcagagtgactgcatctcattgccattacatgcgttctatatattcgatggacatacacctgcgtatgtatatccaatatgtgtgcgtgtgagcatgcgtgtgcgtatgtgcgtccgacataccacttcccgtgctgccggcgagcattgagttgtagaaaaactgttgttttaaaattggggatggaagtcaagaatatgtttgtttgtttttgggttttgttgggtttgaggggttttttgtttgtttgttttttgttttttttaccttttattttgaacttaatatgtctgtaactctgagattaaacaacaagttcgtggctcttaatgttttcctcatagaatgtgactgttgaagaacatgcatcgaaagttgctttcgaaagtacaacgctttattgaatcttaataaattgcaatttttttcttggctgttcaaagtaatgtgtttttcatttttcaaaagacactatggatgtctactttgcacgctgcgattgggagagctgtcccgctgcatgcgttccctctgtaatttcctcagagctcacatacgtacctctctcacgagtgaactcagattttccattgttttgctttattctatcatttgctttgtggttttgctgtaaatattgaaatcttaatcatcatcgagaggcacagccaagctttccagctctccacccccgtggcccatccaagtctgttcatctggtaacttctgttgtctgggacggcagcaagaagatgccggggcttgcctggagtcctggcagaggagtgccactcacttttgcctagggtccagttggggcttaaaaaatatttggagagaagagtaatgaggattttttgtgtttcctagacattttatgcatctatttttgtaaaatcaccttcgctaactttcaccaagcactttgagcacagtggaacttcagaagcacaaccagcctaaccccagaatctcaggtggcacagctagaaattgagtcccttcctaggacactggccgtggccttcagggtgaccagtcagtgccaccgggttggcattggtgttacagacaggcctctgaagacaaaccgagcaccccagcggcccctcaaactaagcaaggatcttttttctgtctgcgctccctggggcaaggtcaaaggtggacccgcccactgtgggtcaattccttcgaaaagatgggacccgcacccccgccacaggctggcccccccccacccatggggaaggtggtgtgctgctggctctgaccatactcttttggaaattgagaaggaaagcattgagtgggacctaatccggagaagaaattaaagaccagaaaaagaaggaagctgggaatgaaactcaaaatgcacttgaacctggaagcggcaaccctcagctctgcgcggccgagcctcagcaagagttcgttttgtgcctgagttactactacaggggcaaactgtacccgtgcctgtgcgctgggagaacaaggtcagcgcccaagggtgtgcaaaggatgtggcaggcttcatggaggaggtggcatttgccctgggcctgggagaccaggttggattttgacagactgggaactcgggggacaggagggcagcacagtgtaagctaaagccctgtgtagggaccccacgcaaagacctcgtgggcctgggtgtccagggcaccatttccacccatgggtgaaaaagaggcttgaggaagacaacaggttcttcacctgcatctgtggatatatatttttttaagtttattaaatttttttttaaatggcagtttcagacctgccctttgtggtttgtgtttttgtttgttaatacagggtctctgtctcccacgctggagtgcagtgatgtaatctcggctcactgcaaccttgacctcaaggttaagctccagcgatcttccgacctcagcctcccaagtagctgggaccacaggcatgcatgcgccaccccacccagctcatttcattttttatttttgtagagatagggtctcaccatgttgcccaggctgatctcgaactgctgggaatacaggcatgagccaggtgcccagcctttgttgttgttgttgttgctgctattttggcaacatcacggcagaacggtaaaggcagaaagcacagtgcccagcagctagcagtgtggcgtgccaagaaggctgttccaatgggggagaagccagcagacacagaggcatcatggcgagccccgactgagtgttcagtgaagagggaaaacagagacagtggggcatcccgagaagatcctctgcaggagtgcggtgtctacggatggaccaagaaaacctacgcaggatccacgtggaaacaaagctgcttagctctgcatatcagtgcttctcggcggagctgtggctgatgggctcctggtgcaggactggcccctgaacagcacaagtgtagtatgcctgggccccaggtcatcatgaaaaccagaagcagacactcaggaggctgaggcgggaggatcacctgagcccaggaggtcgaggctgcagtgagctgtgatcgtgccactgtgctccgggatgggcaacagaaagaccccatctcaaaaaagcagaagcacatttccgaagccccccaagcccacgggcgtgagtgcatgcatgcgtttgtgacagcctggtgctcggatgggcccagagcaggggttctcaaccttggcccattagaattacctgaaaatttttaagataattcacatccggccaggcatggtggctcatgcctgtaatcccagcactttgggagtccgaggcgggcggatcacctgaggtcaggagttcaagaccagcctgagcaacatggagaaaccctgtctctactaaaaatacaaaattagctgggcatggtagcacatgcctgtaatcccagctacttgggaagctgaggcaggagaatggcttgaacccagtaggcggaggttgcggtgagccaagatcgtcccgttgcactccagcctggggaacaagagtgaaactccattccaagaaaaaaaaaaaaaattcacatccaaaattttaaagataattcaaatccaaatcaactcaatcagaatctctcggggtgggcctcaggcaccagtgtttttttgtttgttgggacagggtcttgccattgcccgtgctggattcaaaacacctgggctcggcaggtgttgtggttcatgtctgtaatcccagcactttgggaggccgaggcgggcagatcacttgaggtcaggagatcttgaccagcctgaccatcatggtgaaaccccatctctactaaaaatacgaagatcagccaggcctggttgtatgcacctgtaatcccagctacttgggaggctgaggcagtgagccgagatcatggaactgcactccagcctgggcaagagcaagactctgaaaaagcaaataaaccgaaactcttgggctcaagcaatcctccgcctcagcctctggagcagctgcaattacagacaggcgccaccacctccagcaagtaccagtgtttttaaaacctccctggtagattccgttgtgcagcccaggccgagaagcatcgcggagtcttgtcattcagcctgaaaatagcatcaagttcccatccactcgaacaacagtttgtagatcttaggctgctctcatcgagcaaacatggcctccttgcaacacctcaaatgggtgccaggcatggtacgcagcacacaaactgtgtcacttgatacagcggccccatgaggcgaggagctgggaggtcacagaacatgccccagggcacccagggacacactgaagcccaggcctccagcacgcaagggctgctctgaagaaatacgggaggtcctcactggagggtctggggccacacggtgggtccggagacagaaacgaggagaggacgggctcacccagccgtggggccgcgggctggacatccagtgggagtgggaagccgccgtctcaaggcagaattccctctctgggacacctcgggttttgctcttaaagctttcagctgataggatgaggcccacccacattctcaaggatgatctttaggtgaaatcgactgtaggtgttcaccacattccagcagcacacgatcacagcaacacctcggcccctctcgatgagatcactgggccccacagcctggcctggttgacacgaaagactgactagcacacacggtaattctccagaaatatccaggccaagttcttccactttcctgtcataagcagctagtactgtcctttgtgaggctggcaagatgggctcaacaggtcacaaccaatgatcatgctggcaagccagcagtggcaggcgcacgtccccagccagagagggaccgtgatggtttggaggacagcatctgcacagataggggctggaaaccctacgtcggtccctgtggactgtcacgtcactttctggactgcccacgcagcttcacccagcagcactcgcacctgaagatgctgccacagttggctgcccagaatcagcaccagctacttgctgaggcccagaagcaccacttggctcagatccacccagatgccaactctgtcgggcccctgtggcagcacccagatgtctgcagagcacaggagcatccccatgggattgggtgggctagacccagcgtgggggtctgctagcagccagtggcatctccatctgggtctgacccttttctgggcccatcgctctttgaccatttccccacctgggttcattcccccaatcccaagcgcagctcctgcaggcctggagccctgggctgtgacaggctggtccccacaagcctggaaccctgcgccgtgacgggctggtccccacagacctggagcactggggtcatgacgggctggtccccgcaggcctggagcactggggtcatgacgggctggttcccgcaggcctggagcacaggctgacgggctggtccccacagacctggagcactggggtcatgacgggctggtccccgcaggcctggagcacaggctgacgggctggtccccgcaggcctggagcactgaggctgacgggctggttcctgcaggcctggagcacaggctgacgggctggtccccacagacctggagcactggggtcatgacgggctggtccccgcaggcctggagaactgaggctgacgggctggtccccgcaggcctggagccctgggctgtgatgggctggtccccgcagacctggagccctgggctgtcatgggctggtccctgcagacctggagcacggggtcatgacgggctggtccccgaatccctgtgcccaccccccacagcctacggttttcggtatcccacgggctcctcaaactcagcccagtcagacccaggatcaccaccccccagccagctgctggcagccagaagcagggggccagccccacctcaccaagccctgttcgcctccaagcacaggtgctggttacctatgcctgggaggcaactgtccccacaactcatttgcaactgatatgtctcccctccaagtccctctctaaatttgtctcctgctccagtagatgctacagcatcacccaatggttgacgcatcgctctggtcacaatccgtgcctgctcggctcacttgtgcaggtgtaagcccctcctgggcgcgagttcaggctggtcaaaggcagcaagcgaatcaagccctggcgcggtccagcccctgccatctggggcttggccagcagagggcgcccccactccagctgaggttcccaggacccagacctgcgcctggaggtggccccagggcagcgggaagcaggccccgggtgtggtcacagacacagagccccaagggacaagcccatttgcaaaacccctttaatcagaataaatagagtcccaggcagggcagagttcattggggatgcccaagccggattcacccacccttccagctccagcctaggcgcagctgcggctttcgagaggcgaaactgtcttccttgtcctggtgtcccagcagggtcactgggaggcaacagtgtggtctcagggtgctgggcgggcccgtgaggcccatcgccgtccccctaggcatcctgttcatctgtgagcagggcagggggtgccgcagcctcctcggttgtcccaaccctgccagaaagagacatcactgaggggaccccataaacatcaacatccctgcaacctggctgggcgcagccaaggcccggcgagggacaggccagacgccccacagcctttctcctgagatgtattttaggtccctgtcaaaatggccaggctccggaggccagagaaggctctagagagagtgaaggtgggcgccgggggggagatttttgtaggtcaaaagcggtcaagtgtcagcaatgtcgtggtgtagccccagtggcagccctactgtccagccctggcccctctcccctccaggctcagagtgtccccaatccctccacggaccctcacctgctcctctcctccctctccttcctctcgtagatggagtgaagcttgttgattaagaagattttgtcctcaccctcctagaaaggccagaacacaaaggggaggagaaatcatccatcagcccatccagagccatcctgttccaaactgcatttgagggaaaactcacgaggtgtattcaacatcgcaagcagcaaaaacataaaagaaaaggtgaaagggccaccaaacaaggacaaggaaaaaccaagagccaggaagtgggcgtatgtgtggatctaagcttcctagtggccaaagtgaaaagggaaatgtaatcagcagcccagagccagcctgactcaatttaaaaccagccctgccacgtactggctctgccttgggttactaactctgtgacctcagtggcagcatctgtaaagggggataataacacaaggcacagggtttacattagtttcctgctgctgtcgtaacgaactgtcatcaacttcgtggcttaaaacaccaccggtttctcaactttcagttctggaagtgagaagtccaaaatgagtctcactgggctccagtcaagcatgatcagggctacattcctcccggaggcttcgggggagaatcctcttcctcgccttttccaacttctagaggcccctggctctcagccctttcctccacttcaaagccagcagtggctgctcaagtcctgctcacgtggcaccactctgaccctgacactccggcctctgtttttcacctctaaggaccctgagatcacgctgggccaccacgataatctagggccatctcctatccaaagtcagctgactggcaactttaattctacctgcaatcgtaattccccagccacgcaacgtaacgtattcacaggctccatccagtcttaggacggggacatctttggggccagtactggactgacccagggctctttcgacaatgaaatgtgacaagcagagggggcacttagcaaaggatctggtgcaccgaaacactgatcatcagtgcctgggtcagaccgggattccccgcccggagcttcacacagagaacaggagttctgtcaagagccacacggattggctctgggcacctggcaacctggctcagcctaggaggaccacttagaataccttcaaggagagaccatgggccccttaagcaacaacctaagtagcttctatcgagttgctgatgagtatggaggggctgtgcacttgagccatgccgacctgcacggggaaaactcagaccgacagccccaaagacgggtcagagctcggccttgggtagacaccacagccagcatccgcctggagaaaggtccttcccatcccagagcaacggtgggtagagctgggattctcccagcaccactctgcattccccgcccggacccacctggccctacctggcccctgggggctctgaaatgccacccagtagggcaggagccattccccacttccaatatctacagccagacaaccaccgcagccgagatgccaggctttcagctctatgtggtgaaacgggaaaggcaggagatgggacagtgtgtactacagtgtttacaacccaagcaatgtgggagccgtcccatgagtgcttgggacgagctgggacgagctgcctggagccctggatcctggcaccaactagccagcagcagggtcacatggctgccgaggcccactggctgcaccccgccctgccctcgccttggcagacgccagccgctgatccccacaagcgcccccctagccctggtgtggagcatgcctaaggacactggcactcaccagccccagagtgaaaacctgcaggaggacaaatggcaatgggaggggatggggagccctagggggagggcagagcccagcagcaggacgcaagcctggaaaagccacaggacctgcttcacggggggccgttccccaggggaggggcctcggggaggaggccaggctgggtagcccggggggaaagtgccttgtctccaacttggtgggtgcccagtgggcaaggaggtcctcctgggcagagaggagcgaagggagtgggcacaggggcgaagggagtgggcacaggggcgaagggagtgggcacaggggcgaagggagtgggcacaggggcgaagggagtgggcacaggggcgaagggagtgggcacaggggcgaagggagtgggcacaggggcgaagggagtgggcacaggggcgaagggagtgggcacaggggcgaagggagtgggcacaggggcgaagggagtgggcacaggggcgaagggagtgggcacaggggcgaagggagtgggcacaggggcgaagggagtgggcacaggggcgaagggagtgggcacagggaccagctgccgggtggacagtactcctgggggctgcctctccggtatggggtccgacccccttctgcaactcactcccatgacacagcatgagggcctcagcaactcgctctgtcgcccgggctggagtgcagtggcgcaatctgggctgattctcctgcctccgcctcctgagtagctggtacaggtggacgccaccacgcccagctgatttttgtacttttagtagagacggggttttgccatgatggtcaggctggtctcgacctcctgacctcaagtgatctgctcacctcggcctcccaaagtgctgggattagaggcctgagcccccatgcccaggcttttttttttttttttttatgagacagagtttcactgtcacccaggctggagcgcagtggcacaatcatagctcactgcagcctcaacctgggctcaagcaatctcctccctcagcctcccaagtagctgggactacaggtgcacaccaccacacccagctaacttttaaaatttttatagagacgaggtttcactctgttgcccaggctggtctcgaactcctgggctccagccattctcccaccttggcctcccaaagcattgggactataggcatgagccccaccacacccggtcaaacattgttttcttcataaaaatgttttggccaggcacggtggctcatgcctataatcctagcactttgggaggccaaggtgggtggattgcctcaggagctcgagaccagcctgggcaacacagtgaaactgcatctgtacgaaaaacacaaaaaagtagccggagtggcggcaggccctgtactcccagctactcgggaggctgaggcaagacagttgcttgaacccaggaggcagaggttgcagtcagctgagactgtgccactgcactccagcctgggtgacagagcgagactccgtctccaaaaaaaaaagttttaagtcctaactctcaaccttaatccacctgtttgtaaaatgagtgaagagtccatagggacccaaaaatcctcacagagactgtctaaaccctcagcggggccacacccgggggctgaaatcacaccccaccccccagagccctggtcccagtggggccctgcgggtccttggggatcaggagcctggctctgtctcacggctacttcgtcacttgatctgaagtgcacgtattgatcagggtcacttgtttggcaaacaaaccctttcaccagccaaggcccacaggagatgtacaggggagtggaggggagcgtcaccctcaggtgacctgagagggtgggggctgagagcagcccaggaggggcactcacattgctgatctgctccttgagcaggcagatgaccttgcgctggccccgcaccacctggatgttgaggtagatcacggccctgcgggagaggggctgtcgggcagggcccagggccacagcccgggagcggccagtccccacacggtgcaggcccagcgagggccatctccccagggccgcccccacctgcgggactcacagcagcagggctgacaccaggaagacaaagaaggtgttttccatcaggtaccggtgcacccagggcagccaggagaccctggggcctgccgcctccaggtggcgcacccacaccctgccggcctcgtacatggtgtccagggtccggaaggggccgcaggtgctcgagggcttcaccctggggaagatgccgaccaggaaccctcaccccgagcaacagttcacccggctccctcccagcccgtcctctgcacccctaagccttgggccccccaggcaccaccacccaacccccagatgacacagaagggtctccctccacccgccccactcactgccagacggcgtagcagaggaagacagcggcgcccaggaaggcggggaagcagagcagcgtgaggaagacggtgctcatgtgtgaggccagccagggccggcgcggcgcctggcagttggccagaaggctggtctgtggggaaaggctgcgctctgccaccatcctgctacccctcagcacccctccaagccctgggggagctcaagagggaagggcgaccagggctgtgcgtccaggcagagcctggaccctgctccctgcagcctcctcatttacagaggaagacagaagcctgccggtcacttgcacgcaaacgggtgatgccaacagcacctccatctgctgaaggtcgctgccatgccaggctctgcacacaacactgtacacaccacctccctcagtccccactggaacatggtccccactgcagggatgaggaaacaaaaggccagacgagacaggagccaggatggccaggtgcggtggctcatgcctgtaatcccagcactttgggaggctgaggtgggcgatcacaaggtcaggagatcaagaccatcctggctaacacagtgaaaccccatctctactaaaaatacaaaaaaattagctgggtgtggtggcgggcgcctgtagtcccagccactcgggaggctgaggcaggagaatggcgtgaacctgggaggcggagcttgcagtgagccgagattgcgccactgcactccagcctgggcgacaaagcaagactctgtctcaaaaaataaaataaaataaaaagacaggagccaggatgggaagaaaggtcccagttctcagccactgggcatgacccagttgcggagagaggcccagcatcacttttccagggacccagaggtcccaaggcttggtgtctcccagagccctggccctacccctggccaggtgcacacaggtacctgctaatgacctctgaacccagcgatgcttcccagcctgccgaagacagtgatgccaagaggggtcagccgtcccttgggcggagggacaggccagggcagccccgagccgccagccccactccactcaggtggggagggttctagtgtcccaggctctgcccagctgagtcctgcccccactgccggccaccctgccagcccagccctccccaggccttggcagcctcaccttcttgacatagaagacgagcagcagcttgatgatctgcacggcggggaggaggggcgagaagagcacccccagcctggggagggggtggcagttcaggggctgctccagtgccctcccctccccgagatcaggctggttccagaccacgggcagggcatgtgacagtggccaaaactgagtccccggggttagggtctgcatcactccagggtccatggccgggcctggctgtggccccagggggaggcaggtacaggacccccggggggaaaggggcactgaccgaggggccagacagtaggaggcaagcagaggaccctcaccaggtcagagtctgcccataaatcagctccaggacattccgggcaatgtcaaactccggcttccgcctcctcttcagcttcttctcggagataatcctgcctccgaggaccccggatcgttagatgggaaagccatgcccagggaggccagcctgagtccccacacccagaggcaccccgcccccagccaggggacatcctggccgttccacagataatgccaagaagagacagccaccagcctgggggaccccaccaggtgcttggtcacaccagcctcatcctaagtaggttcggatacacccggagttaaacaagcagtatcagctccagcaccaaatgattttttcttttttgaaacagggtctggctctgttgtccgggctggagcacagtgacgcaatcgtggctcactgcagccttgacctcctgggatcaagcagtcctcccacctcagcctcctgagtagctgggactacaggcacacaccaccaggcccagctaatttttatttatttttatttttatttctttagagacaaggtctcactctgttgccgaggctggtctcaaactcctgggcttaagtgatcctcccacctcagcctcccaaagtgctgggattacaggcgtgagccaccacaccgggcctcctactgatttttttaatcttattttttattattattaaattcatatattctcgaagaaaacaccaagaggaaaaaaacagctgaagtgccagaacccacagcggaatacctggaacattttttaaatgttcctccgctgtctgttccctgctgtgtgtttttcctttgtatcctagactgaggttgtgtcatatacacgttacttttttttttttttttttttttttggcaacacagtcttgctctgtcgcccgggctggagtgcagaggcgcaatctcagctcactacaacctccgcttcccaggttcaagcgattctcatgcctctgcctcccgagtagctgggactactggtgtgcgccaccacgccctgctaatttttgtatttttagtagagacggggttttgccatgctggccaggctggtctcaaactcctgacctcaggtgatccactcacctcagcctcccaaagtgctgggattacaggcatgagccaccatgcctggccatacacatcactttgaaacctgttttcctttccaatctaaaaatgagttcggttctatttcctgagtcttcctctgaagggtggagacacagggccctgatgggaaaggtccaggcctgagaacctcccggccacacgtcccggccactaaggggagaacactcaccacccagtccgcccaggaccccctcacctccacaccagttccccaaaaagcgtgtccagcaacatgaggacgaagtccatcaccaggaaccggtacagctcctggcccacaaaatcctcccagcactggccctgcaggacgcccaccctgcggcccagccagtggtagcacagtgtccccaggatggccagcttgaggatgaggttcctgcggagggcggggtgcaaaggctgaggggcgggtacaggggacagaagatgcaccccagggcccccaccaggggcttggtcacaccggcctcatcctaagtaggtttggatacacccggagctaaacaaccagtatcagctccagcaccaaatgatgttttcatgtgcggccacacacctgcagatggccacgtacacctccagtaccggggagtcatgcggctccagggcggccaggacacggcacaggtagggggcccccaggttgaggaggccaaccaccaggggcaggaccagcagcacagcctcctggccagcagcctctggactctgcaggggtgcagggagcggtgtcatggaagccccccatccatggtgggagcgggcagctacagggaagggcccggggtggaactggcaggtagcacctccctcctccaagatctggccctccccaggcctcaagttcaaaccacacaggaagcagggaggggtacaagtagtggaaaagaaaccagaaaccaaaaaataaaaccgtgagacaggacaaggggctgagaagtggggctcggagggggccccagcacggggcacagcgtacgtggcaccctgggctggctgggtggaggaggagaggcaaggctgcctccccagggggcaggtgcccagagtcactggggacacgttccaagcaagggccaggctccccccatccccgcacctggatcatgaactccgagaagacgtggacggccacggcgcagcccagcgcggtccccagacacagcagccacacaagccccagcacagccgcctgccgcagcctcccgcacacgctcctggggctgtgccgcagctgccactcggccagcagctcctgcaggcggcaccgtgtccccgtcacccacaccagagcacgggcacacgcagacgtgcagacacagcacaacacacacaacacacatgagacacaccaggaggcttgaaccaggacagagggccagttccccatgccccacctgccctttcatctgctgagggccctccctccaggcgcagagaggacccagtccccctgccgagaggcccctgtgcctgggctggcgttcactcccgaggcctgcctcaacccctctccacccacctccccagccctgcccgctggggcaggggccttgctcagaggtcctttcctgttccctgtggatgtgggtggcccccagtgaccagaagcccccctacacggaatggctcatgacaggtcacagctctgagctccttgaagcacagaaccccagaaaggcagagaatgttccacgaggcccggctctgcagcctcctggccccgcaacctctacgagggcctcggcctctatgcctcagtctcctctctgaggcacacagaaggtgacagtcctcacccactggcctcctatggccaccaaccaagctaacgccagccagggagcatgtgccagctggggcctgaggcctcagggctggctcccgggtgcccacggggccatggcgctactacgcgctagcagacaacagaggcagcccctaactgatgggtgtgtgccagagaaaaactcagggcctgcccgtcactgcaagcagaagaccacgcctgcccagcgccccgagttcagctcacggacagctggccctccctctagaccatggttctggtcacatggtcctaagtggacccagggccaggcctgcagggagctgggcaggccagcttggtgctccggggccactcaccttcagccgggtgcgaatattgtcctgctggaggcgggaggcccgcttctgcgtcaccttgtagtcccaggagcagaagacggtgatggcgtggatgccagaggtgctgcccacccggtagctctccccgaaagagtgagccatgctggggagaagcagacacagacatggcaaccaacaagctgacgggcagaggccaaggggagaaggcagaccggatgctctgggcagccagaccccaccacccactcaggagccatctgggccctgactgggcctcctgccacacccctgccccaccaccagccctctacaccagtctcatccaacatagcacccaccagccacatctgcctagaagagggggcagggctgcattcaccgcggacttggctggctgcctcccagcgagacatggaccagaagatgctgggctcacctcagggcctttgcactgctggtcccaatgaccaaaacatcttccctgcttccttatccatccccactcttatctaaccttcccctctcagggcaagtgccgcctcccctgggaagcagcctgactccttccccagtgctcccataacactggggaaacaccactaagcctcatggattgtcccagcccattcagtggtccatcttctcccagagacagcaagcccccctaggacatttaccatcctgccctgagctgagcacagagaatgtttgtggaatacgtagatgcatgggtggatgggtggatggatggatgaataaatgtgtgggtggatgggtggatggatgaacggatgggtggatgaatgggtggatagataaggaggtggatggatgtgcgaatggatggatgcgtggatgaatgagtgggtggatggatgaatgggtggatgggtgggttaaactgagtggatggatgggtgggtagatggatgaatgggtggatgggtgggtggatgggtgaatgggtgaatgtgtgaatggatggatgggtgggtgaatggatgaatgggtggatgggtggatgggtgggtgaactgattgggtgaatgggtgggtagatggatgggtgggtgaattgagtgggtggatgggggggtgaattgagtgggtagataggtaggtggatggctgaatgggtaaatgggtgggtgaattgagtgggtggatgggtgggtggatggatgaatgggtggatgggtgggtaggtagatggatgggtagatgggtgggtaagtggatagttggataggtgagtggatgagagcagacaggtagatggacagaaggaagaaaggaagagggaagaatcaatgaatgggtcgaaagatgaatggatggatgagtggagctcggagcctgggtcatgaggtggaggcattacctgtacaccagggtgatgcaggtgataaagaagctcacgcccacagtggagaggtaggccaggggcatgttgtagggcaggccacccaccctgggtgtgcactggctgccatccagggggctgccacacggctggttcagcgtggcgttactgtagtggccgtagtacatgacggtgtgggtgaagcaaccctgccacagggagatccagccgagtcagggactttccccacgccccacccgaccctcaggcctgacagccacaggggcagagcaggaggaggccaggcaggggcagtgagggaaacagggaggggccttggccacagcaatcttgggcctccagccccatgggaaccccagcacgatgagcatccagggtcattgagggggaggcggggagctggctgtggccacctggagtcacagcggggcaagggttgggggccccaggggagctgggacaagaagggaacacggtaccagggtagcagaagacaggcaccccccgtcccccagtcctagggcttcctcaccgcgcctgtgaggagctccaggcctgtgcagacgggggcagggcccggcagggcgggtgggaaggcgacctgagggcccatgatgaaggccaccagcagcagcagcaggagggcattgaaagccagcagggtcttgagaaagaggaagtaggagagcacgctggagccgaactggcccccgatgcgcttcagggcgtagcgccacggcatcagggcctgcagggcggagagcagcgccaggcccaggctgtgcaaggcctgcgggcacaggcagagaggccctgagggtgaggccggaggaggcactgaggccaccccagccctgcccagccgccccagccccagggcagaccaggggcccataccagcacgcaggcatatctgagccggccacagcaggagcagaccccgccgctgcccggctggcccctccacttccccctcggggtcctgctcttctctctggggacagaggcagccataggtgcctggaccaatgaggggcctgactctctccttcctggagaccggccacccacgggctcagccccttctcccccaccacctagcccagctgaggaagtgggtctgggggcgcagcagcggcggcatggtcagggtcggggctgctcaccgcaggctgcgtttctcagccaggcttaagggcatcccgcgaagcatgtggtcccgctgtgccactgccaggctctggagctccttcaccaggaggctctgcttctctgcgagagggagagggaggtcctgcccatccccaagtgcccctccctgcagcccgaagccgggaccctggtcaggcctgtgtgtccctgcggcaccgtcccgagacacctcggtgcccttatttgagcttcagtcgccaatcagccgtgtgtttgcttcagtcagcgacaagcaggaagctcacagagcacaggggcctgtttcccacgcacggtccccgactcggggcccagggccacagccctccaagcactccaaggcgcttgtgaggtaagacccccacttccctgtccccgtgggtccctgcagagggacgggggggccttcaggcagcctgctaagggataggagaggggcctctggctctgcagcaccccagccaccgcccaggccaggctggcctcttgcaccccaccccaggccggtgtccgccactggggctccagtgcccactcactcaccctcctcctccagggccgtggggtccagctccaggtcgtacaggcggaggctgggccaggcggagcggacaaagttcccgagcaggggccggctgctcctgcaccgaagctgcaccgtgcggttgtagtactgggagatgatggcacctcggctgcggcctatggaggcagctgggcagggccgggccgggcagggccaggcctccctcccctcaggatgggctcaccacaggcctctgcgtccctcaccccttcccaggacccaggaaaatcctttcaacaaagacttcaggcaccactgcattccgaaagcctatttttaccccgtgatgactctggagtcatttttggagcccagcgagggccacatggggctgtgctgggcccccaggcagcagatgggatgggctaggagcccgccctgggcctggctctgagctacgggagcagccactacccagggagatgcctggcaggaagcccagcccagccccagggactggggtcaactcggggccggggccgaggccgaggctgagggtcccactcaccaatggtgcggctgggcatgctggccaggatgcggagtgtggccgtgctctgggtgccctcgggccgccagagtgtctgctggctacttcctacaaagcaagaaagactcaccaggggtcctggagatgccattggccacagtatctcccaccccatcccaggcctgcagagctgggaggcccgtcctgaggggctggggcacccaagtcttggtccacaccacccagcatccaggcctgagctcacctgtcacctcccgctctctctgctgcagctccagcccctcctgggccgtgcactggctctgctcctggatgagctgctggaaggagtcgtgcacttcgctttcatcataggggctggggccctggctgcagagggggttggcgggggggtcaggctccagccacctctctccttccagcagcccctgctcaggtgacctctccgtggggggtggaacattccagcctccagcccccagccccagagcgcttacccctggtcccctggggtctcagggacatcgaggatgaaggccagtggctgggccatgtctctggccaatgcccgctagtctgcagacctagggtagctcagagcctgggcgccacctccggagcccccatctgatgagacaggggcacagagccaggggtggtcttcaacgcctggcagctgtccacaccacccattcctgggggaaccacaggaggtgccactcacagcccagacagtcccgcccacccccctatcaccccaggtacataaatggtgaggcaccgaataagcctcatgccagaatggaatggggggccccctccagtgtcaggggaggggagagaggaaggaagggtgtggggtctgcagttccacatctgtttcctcgatgtcgccagtccctgggaaatggggaagaggtagggtgcctgtagacacagcccctttcaggatctccatgcccagggttctggcacagagacacctcctttttggagagaaaggtcagagtaggctgtaggccttctctgcgtctgccctgtgacctcaaagaacttcctctagcaggaaattagctgctggagccctcacccccaaccagccccaggcggaagcagcacagggggctcctcccccacacacagaggtcactccatgccaccgccgtcagggcgccaaggtcctcatgttctcagaagacccactgccctgcattccatcatcccagggcggccggctgggggtggccaggacctcaacaggcctcctttgtcctggctctgccgtcacccggcacaactggaaccagagcagccttgtctggggccctgggctcggggcccgttcatctgtgagagtggagccaggactcagctcccagccaccagcgagtcctgccggcctctgccctggactcctcctgcgctcaccctcaggaactcagggctcaaagtcggccgggttgaagggcgctttcctcggacaggcaaagcccgggggcgccccgacagagcagctccttgcaggggtgccagtcacaggaccggacggcgccctccctcagtgtcctgggtgccatcttcgggcccaggccccacaccaccccctccctccagcaggagcaaagacgtgggaaaaccagcccagagctgggtccgaggcggccccacccagcctaacacgggacagctgccgaaagaggggctgaggacgccccacccagtccctagagctggaatcccttcctccagacaggcccttctaagctcagggaacccggggactcgggcacccagcgccccagcactccgccccgaggcccaggcaagtccagcggagtttccaggcgcaccattcctgagctaggtggggagaggctgggtggcgcccgtttccaggaacccccaccccagccggcagcgagcttcccgggagcagccgctacccagggagaaccgcaacctggccccagagcccagagcggctgcaactctggggccaccgaacccgtccagccggcctccctgtcccccgccccttcccatcccggccacaccccctcccctcccctccccgtgccctggcgctcggctgggggacctgggtgggggctgcggattttgctccccgcactgtcctccccgcccctgccgctcccagctctgtccgagccggagggtcaagccctgggagctccaggagcacccggggagggaactcggctgccaaatggccccagaggccgaaaggaattcaggggggattgccgctgtccccgcataggagaagcagctggggctggcgggacccgggaccgggatcgcggccgctcacctgggaggcgccggggaggaggggccgcgcgcgcagccagggctcacctgtgccccgcaagagccgccgggaactgaggtctcggctctccttgccaagggagtggcaaagggccccaggggcgactgggccagtcgcaggtctgccggggccgggggagtagccgcacctcccggcccacgtgggcggggggggggggggcgggcctcggctatcacgtgacccggcccggcccgcggcgcccccgccctcctccgggcgccccgcggcgactatgccttcctcccctgccaacttccgacccctcctcctgaggtctgagctgggctggattcattccagcccctggttgaagtccccaatttttctgacgctcagtttccccaagttccaaaaaggggcaatatttccagactcatctgcttcccatggttagggatcgtccaagtaagatgccgccgaaagccccagggacacagagtatctcactccagattgggcagcgcccccccccccgccgcccccgcaagcctcctgctgactctccccgaccccggcggggggagcctggttatctcccactcctgacacctgggcggggttcattgtttatctagcaagagttctggctcacttcctgtgtgctgtgtggagaggaggggatgaaaaggaggacacgctgacacttaggtgactgtccccaggtgctgtacccgttgccctgttttctgttattccccatgagccaggaaggtatgcactgatattcccatttcacagatgaggaaactgaggctgagagaagttaatcaccctttagggtgcccccagccaaagcaggagacttagtggtccacctgggaactctatggaggaaactgcctttgagattgtaccccccaccccaagcccatttggaagggagggtcattcctggcggggagaagccatgaagcaggcagggtgaatgtgagctggggcccaggagggcaggagagggcactgctgcaggggagagcaggcaagcaaaagcgaggaccaggcaggggtcaaggctggggccttttggagctgccagtgtggtcctcagatggctaccccaagctggttcttggcaagtggcaccctggcatggagacccagcccctgcctctcctcccactgcttccccctccctgcatacccacactgaatttgcatgaatgccacctcctctggggagcctccccagattgaaccctggtggagcacctaccacttcctattgacatgtacatctgtggttctgtgccccctcctaccccagcccactgtgtgcccagcaccagcacatagcttgcgcctgacacacagaaaggactctggaaaccaggaaggaggtgggcagagaggcagaaaagctatgaacattcagacctgagatgactgggccctatagcaggtagagagggagcagagaggaagggctgcgggcttcccaggggcccaaggacagagaattggcaaagatatgtcttaaacatctagcctgggagagcatgaatggagccaattcctgagcacttactaccggccaggtgctaggcctgggtcttggcacaaccataacgccaatgacaggggctggaagtacagcagtaacaccaagagtatctggaaacccagcagccaggttctggggagcccaccatcctgtcattatcacaccctccagggtgaggccggcagataaagagtttggcccctgtgcccccaccgttcccatccccacccatgtcaggctcccagctcaggcctcgaggtcaagtcctgcctatccaggctggaaggagttgaacagagagggcctcagctgcaggctggacatccctggaggcagccaggcggcagacccggaccagtggaccctagggctgcaggagaccaggccctgactcctgtgcagaggggaagggtgggccacccgcagcccagcatgcacagagctccctgggaggccaagtggcctacgcctgtcaccttcacctctgcatctcaggggcccacaggaagtgcctgcttggcctcagtttaaagcagaggaaaccatggggtgagaggggaggagggaggtagtggagagggaagctgggtttcctgtcatatgacccctcctctgggctccctcaccaccctgcctggcttggcaggagtcgtctgagaaggggactcctccagggacttggtccctaggtccccaggtgagctggatgtccagtggagggagaatgcagagggtgaggggctgtgggggccagctagagccctgcaagggtagcagtgggtccctgctcctgtccccacggctggggctgtagccacaggtcctcatcaggggctcgcggggtacctgggactggaggctggaccacaagaaggaagacagaagggggtcccccgacatccagagtcagatgtggcagatgccgagtcccaggaactgtggggtttgggacacaggctcttccggaagggcaaactgccacgtggagaagagagggaattgtctctccttggggtgacggtgggcccaggcacaggtggatgcggggtgcagcaggtcttggctttctttgcctgtgccggtccagactttctgtgccctttggatctttcaccccatttgacagatggggagactgaggccgtggctgtgtgtccctctgagagttggagcggggctgggcccgaattcgaccgcagcaggattctctctcatttctgagccccggaggtggcagagcggcagacccgggcaagtgaaccctagggctgcaggagcccaggccccgacgccggcgcagaggggacggaagggcccgcccccagcccagcgtgcacagaggccatagccaaggccttaaggctcatccaaccggggactcatatcccccccaccggcagcccggcgccccagcctctacccgtgcccgccgagatgctgctgccgcggtcggtgtcatcggagcgggcccctggggtgccggagccggaggagctgtgggaggcagagatggagcggctgcgcggctctgggacgcccgtgcgcgggctgccctatgccatgatggacaagcgcctcatctggtgggtgccacgcgggcgccagacggtgcgtggggggggtgctgcgaggctgccccgtcggatggtgtgggagcaccccgtctgcttggcccgggtgggcagggcgggtgactcaggggcgcccctgtcaccacccccgtccaggcagctgcgggagcccgcgggggtgcagaccttgcgctggcagcggtggcagcgccggcggcagacggtggaaaggcgcctgcgggaggcagcgcagcggctggcccggggccttgggctctgggagggggcgctctacgagatcgggggtaggacccgcgcgacccgcacctccccttgccctctctggagccccactgcccagatcggaaaaaggagagtggcatcatcccacctgccttcacccgggtcccccgaccaatcggcccctcccccctcccaccccttccgcccgcaggcaccgcaaacctcgggcccacgcagcacccccaggtgactgtcagcggtacctccggactcgggcgggtgggagcctggcgggcaccccacgccgtccggtgggcccgcccttggactctcagcgcggccccagccccggccccggcctccctgacccaccctgctctcccactgcaggcctcttcggcacaggaattcggtcctacttcaccttcctccgcttcctgctgctactcaacctgctgagcctgctgctcaccgcaagcttcgtgctgctgcccctggtctggctccgcccccctgacccaggccccaccctgaacttgagtgagtgtgaggcccaccaggggaagtgctccggtgcccacctgcgccatgggggggctggcccagggcccagagcgtggcgacaacgctgggcgtggtcctgccgtgcaggccccggggctctctctccctgacctcgccttgtgtggggcacgcctttggcacatcctcagccccctgcccaggcctccccagggttgggggttatagagcagtagccgcagagcctcacctatgccttggggatccctctctattgacccccttcctcctcaacagccctccagtgccctggtagccgccagtccccgcctggcgttttgaggttccacaatcaactttggcatgttttgactggcagggtgagtgaggtctgtcccggctatggtccagagtctgggagacccagggaactggcttcaggggacacaagtctaagaggacctctgctcctccagggacatttcggctcctcaggggatggtcttacctagacagactggcctggccggtggtggggttagagagaggctgaggccactgtgcccaacatagactcatggacacatgcccgtggtcctcagagcccagctggtgtaggcggtgccagggacaaagggggaaaagtgccccggcctctgggagaagcacttccccaccctcatcctgggaagccatcgagtggtcaccaatggggttcctgggttccagtcgtggctctatttctcaaagccctgtgaccgtgggcacgttgccgaacctctgtgggcccttgtaagacgggacactccctacctgatggggggattgcacgggggctaacaagatcatatatggaaagcacttgagcagagcctggtgctcacccgggctgggtatcttcgtcgctgtccccaggccttcaccaacacctatctcttctacggtgcgtaccgagtggggccggagagcagctccgtgtacagcatccgcctggcctacctcctcagcccgctggcctgcctgctcctctgcttctgtgggactctgcggcggtgagagcgaggtccacaccttcaccccttccccagggaatcttccctgatcaccccttccttggcagggtaccctcccattggcaggaaggcccatggcccggcacagcaggctcctgggtgcttcctcagcccaggctctggccgcaaaccttaggaacagggccaccgccccctaccccgactcctcactcaccaggacctgcacctggggctgcaggggccttcccagacccagagccgagccaaggctgaggctggatggtagaggtgcccctcctccagcagcccctggtctcctgccccgcaggatggtgaaggggctgccgcagaagactctgctgggtcagggctatcaggcgcctctcagcgccaaggtcttctcctcatgggacttctgcatccgggtgcaggaagcagccaccatcaagaagcatgagatcagcaacgagttcaaggtgtgtgcacgagtgagtgcctgagatccacaagctccaggtatatgggagcgagtgcgtgagagccacgtgttccaggtgtgtgcgagcaagtgcgaccgtgccagtgtgtgtgagcgtgtgtgggagggagcctgtgggagcgtgatggagagcgtgtgaatgtgtgtgcatgtgtggccgagtgtgagggcacatgtgactgaatgggtgatggcgagcacgcctgtgaatgtgtgaatctgagtgtctatgggagcatgacagtgtgagagtttgtgactgtgtatgtgagcgtgaatggttgtgactgtgtgtgagagcgtttcctgcaccctttcctcccatgcccaccccgcctgcagctgcctctgtccccacccttccgggcaggtggagctggaggagggccgtcgcttccagctgatgcagcagcagacccgggcccagacggcctgccgcctgctctcctacctgcgggtcaacgtactcaacgggctcctggtggttggggccatcagcgccatcttctgggctaccaagtactcacaggacaacaaggaggtgtcaggcaactgcattcatttaatcctggccagaactgcgggggtgagacaggatgatcccattttacagatgaggaaaccgaggctcagagaggttcaatcggtcgtggccacaggtcacggccaaggcaggcgggctcccactggatattcccgccaactgccaggctgctgcagggaatagcttacaggcgaccctattctgggcctgccccagagttacactttagggcactgtggggggcggggagcagacaggggccccccagcacgcgggctcccctgacctgccttttcccgcaggagtccctgtttctgctgctccagtacctgccccctggggtcatcgccctggtcaacttcctgggtcccctgctgttcacatttctggtccagctggagaactaccctcccaacacggaggtcaacctcactctgatctggtgagtgccacccttggtggggacaagtgggcatgtaacaagtctgcatcctgctgctctcttttggttgtcacctggcacctggggtccccagctgagaggcttcccccttcactagtggcccaagggaaggcaggtacacacctcacagcacacgacctcagggccccaggtctaaggctttccaatcccccacctccaaaggaagccgccagtctggaccaagctccggccattcagtggagcaagggactgtggccaggggtgctgggaatgggctttgcacacaggaaaaccagcaacacgggacatgcagagcttctacatgccgagggtttactccccttacctggacaaccctcacgtgacccgtgaagtccagaccatcctcatcccccttgagggatgaggaaactgaggttcacatgagtgaagcgcccagccaaagtcaagctcatcgtgcctgccaggtgcaagttcaaaagcaagccctcgacctcctgggctcaagcgatcctcccgccggagcagctgggactaccactcccaggttctgccatcttctgtctcagcacttaggtcctgtctagaccccctacttctccacccctcatccagctgcagaaattcttgtgtaaagcccacctgagctcccactggcttctctccctcacgccaccctcagtcaccacttgccctaactgcttttccctctgcttcctcaaagtcagctgtgtttggtttgctttgaaactttattttttgaggccgggcatggtggctcacgcctgtaatcccagaactttgggaggccaaggtggatcacctgaggtcaggagttcgagaccagcctggccaacatggtgaaaccctgtctctactaaaaacacaaaaatcagccaggtgtggtggtgcacacctgtaatcccagctacccgggaagctgaggcaggagaatcactcgaacccaggagacagatgttgcagtgagcagagattgcgccactacactccagcctgggtgacagagtgtgacttcatctcaaaaaagaaaacaaaacaaaaaaagctctcacctacccctagctccctcaacaggagaaccactgttcccagccactctgtagccccatatcagcagtgggaatgttcacccttagagataacacgcaaccaggcacagtgactcacgcctgtaaaggccaacactttggaaggccaagatgggagaatcacttgatcccaggagtttgagaccggcctgggcaacatggcaagaccccgtctctacaaaaaatacaaaaaaattaactgggcatgatgaaagactaggacacacagtcctagctactagagaagctgaggtgggaggatcacttaagcccaggaggtcaaggctacagggagctgtgatcgcgtcactgcactccagcctaggcaatggagtgagaccctatctcaaaaaaaaaaagcaaaaacagataacatgcatgtgatgatgtttcgtttagacaatcacctatttggtctggtcatgcattgtgcagtacatatgtgtggcacgtgtttatgacatgcaagcttgtgtcagtgggcttcaatgtccataggcggcggaggaaaggaggagctcgcctgcagtcaggatcctgaaaaggccacaggcttctccaccgcagggcttgctgcatgtgcctctccacaccaggcatgagggaacatggctggactgtgcagtgtttctcaaactgatctaaaaacagaacccttggccaggcgccgtggcccacacctgtaatcccagcactttgggaggccaaggcgggtggatcacctgaggtcaggagttcgagaccagcctggccaacatggcgaaaccctgtctgtactcaaaatacaaaatttagtcagaaatcgcttgaacccaggaggcagaggtggcagtgagccgaggtcacaacactgaactcctgcctgggtgacagagtgagactcggtcttgaaacaaaacgaaaacacagaaccctttttcccatgaatcgcctggagactcggactctgagaacgcactttggaccacattgccacagacagagcaggttggaaggaggctgggcccaggacacaacatgatcccactcggacatcagccacacctatagcctgggtagagcccggtgcccatgtgcctgggcccctccacctgacaaggtccctgcccccaggtgcgtggtgctgaagctggccagcttggggatgttctccgtctccctgggtcagaccatactgtgcattggcagagacaagagcagctgtgagtcctacggctacaacgtttgtgactatcaggtggctggcagcccggcggggcctgtccctcccttccttctccccaaaaagctcacctcaaactgtgcagagccctgttcctgcccctttagtcacctttgagagaagctgtgagcagggctgcctgcaccgccgcacacctccagggggcgccactgctgccacatggtgtagtgtggctgccctggctgtggggcttcctgctctaatcccatcctcaaggcctgggtttcaacctaacgattctatcagacaccaggcaaggcacctgcaccacagaaaccctcacaggaggctaagggaaggaagggccggggtggccgtgagtggtgacgggtccccttcccctgcaccccagtgctgggagaactccgtgggggaggagctgtacaagctgagtatcttcaacttcctcctcaccgtggccttcgccttcctggtcaccctgcctcggaggtgagccccggggtgacacctccagaagggcgggggtgccgcgagcatgttgggggtggccagtggctacagccaagggtgagcgggtccagtgtggagcccgggagtaagtggcaggctgtggccatgaccaatacagcccacgcatctgtctggagtggtgagtacctggaccctcccatccctgcaggctgctggtggaccggttctcaggccggttctgggcctggctggaacgggaggagttcctggtccccaagaatgtgctggacatcgtggcggggcagacggtcacctggatgggcctcttctactgccccctgctgcccctgctgaatagcgtcttcctcttcctcaccttctacatcaagaaggtgacggctcatggctggggggtatggggttcgtgcctctgggtggatgccttgagctgggctcgcctcctgctcctgctcctgcccccttccctgggtgtcagccccctggggtctgcataactcgctgactcctggttgctattgcttgcgcccccagtacaccctcctgaagaactccagggcatcttcgcggcccttccgtgcctccagctccaccttcttcttccagctagtgctcctcctgggcctgcttctggctgcagtgcccctgggctatgtggtcagcaggtgaggggaagaggaggggggcacccagaggctggcaggggcagtttctcacccaggaccctgatgccagccccacttggccatctctcgccagcatccactcctcctgggactgcggcctcttcaccaactactcagcaccctggcaagtggtcccggagctggtggcccttgggctcccgcccattggccagcgtgccctccactacctgggctcccacgccttcagcttccccctcctcatcatgctcaggttctcagggcagccggggccatgggaggggacacctggagggggaggtccttccttccatgggggtggtgagcctgtgcacccccaaccaggagccagacgcagaaagccaagggaagcaggggcctctgaaaagcaggaacctcctgggcccaccctctgggctgccatggggattgcaggatcactggggaagcaccgtgtctgggtggctgcagctgctgagctattggtattgctgtgccagaggggaggggatgaggggctctgcgaggaaggagaggagggtcccatcctcagatacagcagtgtgcagtgagaagaccccagtaccgcgtattgtagagattgaggtggggagagaggaagtcagggagaggcgcctgtggccccaggggcaactgaccacgaatccccttcccacccaagccttgtcctgacggtgtgcgtctcccagacccaggccaatgccagggccatccacaggctccggaagcagctggtgtgggtgagtgtcctcggggctggtgaggggacagcagcttcagtggaaacccttccctatgtgtggccgagggcctagaacacgtctgagcgggtcaggtgggttcttcccactggagggcgtggcctcaggctgagagtgaagacggggaaggggaggaagagaacagctcgggctcctgagaccaggagccagacctggtaagtacatgaccttaggggctgggcctttgcctgtaatcccaacgctttggaggcccaggcaggaggatcggatcacttgaagccatgagttaaaaccagcctgggcaacaaagcaagaccctggtctccaccaaaaataagtaattaattttttaaaaggagaatgtggccgggcgtggtgactcacgcctgtaatcccagcactttcagaggccgaggtgggtggatcacctgaggtcaggagttcaagaccagcctggccaaaatagcgaaaccccgtctctacttaaaaaaaaaaaaaaaaaaaaaaaaaccgggcacggtggttcgtgcctgtaatccagcactttgggaggccgaggtgagtggattgcctgaggtcaggggttcaagaccagcctggccaacatagtgaaaccccgtctgtactaaaaatacaaaaaattagctgggcgtgatggtgggcgcctgtaatcccagctactagggaggctgaggcaggagaatcgtttaaactcaggaggcggaggggcggaggttgcagtgagctgagaccgccccattgcactccagcctgggcaacaagagcaaaactccgtctcaaaaaaggaaaaaaggataacatggctgagtgcagtggctcacgccgaggcgtgaagagtgcttgagttcaggagtttgagaccaggctgagcaacatagcaagacctcgtctctactaaaaatcaaataaatgagctgggcgtggtggcgcgtgcctgtggtcacagctattccggaggctgaggtgggaagatcgcttgagcctgagaggtccaggctgcagtgggctgtggtcttgctactgcaatcctgcctgggcaacagggagacacccagtttccacaaaaaaaaaaaaaaattacgactttaggcttggggccaggggcttaatggagctgagggaggaacagtgacctggctaaggcgtggcctcagggtggggcctctaccgggggcgtggccttgggctgcttggggacggactcttagcgggcgtggtctagatctgcatggggtgggaccctagtggggcgtggtctcagggtgcgttgggggcggggcccttggaggtcgtggtctcgggcggggacgtggaaggagtggcatctggctgcgttgtggacgggactcctgagggcgtggtctagggctgcatcggggcgggaccctggtggggcgtggccctgggagggtgtggcctcgagcggggcgtggcctcgggcggggcgtggcctctggctactttgggtgcgggctggcccatgggccgcagagttgctgccgctgctgtcctcacacccgctcgtgggaagcagcgcctgtcgcaactcgccacttgttctcctcacagcaggttcaggagaagtggcacctggtggaggacctgtcgcgactgctgccggagccaggcccgagcgactctccgggccccaagtaccctgcctcccaagcttcgcgcccgcagtccttctgccccggatgcccatgccctggctccccgggccaccaggccccgcggccgggcccctccgtcgtggatgccgcgggactgcgttccccttgccctggacagcacggtgccccggcctccgcccgcagattccgcttccccagcggcgcggagctgtaacccctacccctgcctccccgaagcctccctggggccccttcaggcctccttactccatcttccagacccctggcgaccaccgcccctctcagtggctccagggcctccctcagaggtccccaaagatggacacacaaccccagcggcagcaggaaaaacatatgggaattttctttctatattttaatctcatccctttaaaatgtctattttttattgtgttttttataatatacataatctattagtatagtatctcttgaatgcgattttttctagaatgtgttctgctgatttgttttagagccatgagtgcaatttatacacatacatctattgggaatgctcagaagttgtttactgatggaagtgccttcagaagagtccgggaaccacttcctaaggaaggaaagagctggccacagttagagcaagcctgcctggggccctgctctgtgttccagctgcaaactgcctgcatcatcccttcctgttactcttccttcacctgagacagtcgaggccacagcgtcagccagggccagagctgggatttgaacccaggcactcgggctccagagccacactgccccagtgtggggcttagtggcggctcctggccctgactgaggggctgactgaagcctggtgagagcgtgctgggtcagcctctccctggcgggaatcctctccgtccagtcttctaacctagcagcctcacgtccacagagctgccttgtgaaactcagcagagccctggcttcctgcagagccgtgttctcccagcctgcttcatggctccctggttgagccaagcttgcggatccgtggggtgaaggtacccgcaccgcctgggccttagtggtatgtacgggcctgcatcgtgagcagcgggcgggggcccaggcaggtgaggcagctggccacaagggcagggcccggcccccctcccaaggctgtgtctgatattcttgagcctgttcgagtttccttttccaagcctcctgttctcccacccccacccctgccatgctgcagtgactaaatctgtggttctcatccttggagaacacctgagtagctgctacaagctggccacagcccagcgactctgatgtggttgggctgggtgtggccagcagccagggcatcgggacttttcgaagctcccaggtgactcaccggcagctggggatgagaactgtcaggagggaaggtcagaagtcccaggatgcacttgaaaagcctctagctccaccagtgaccagctcctggctggactcctggtctggactcagcatcagggaggctctggcctctcgccctcagggctgggggcttcttcacatggtcatcaaagacttggccagttccgcctctcccacggccgtccttgtctcacccagcatcacgacgcatcagttcaccaacaaacacgattcagtgctgctagtgctgggtcctgttctgggggctggtgatgaggccaagagggaaagagggagctctgtgttccatcgagggggcgacaagcctggaccagatgaaagtgactcatgttgttaattagcggcttagggccaaaggtggcccctggaccagtggcctcagcatcacctgggaaaaggttagaaatgaacattcccaggccccacctcagcctcctgaatcagagcatccctttggcaaaccatactgagaaacaaccacgtgcatcaccaagcgctgtgaagaaggcaagctttgagaccttgaaggaatcatcaaactctgggcctcggtgtgctcacccagggcgagacaaagacgccatgctcctccaagtggcctccaagattaaatgagcaatgactttttgtgtgtgtgttttttttttttttggggggtggggacagagtctctttctgttgcccaggctggagtgcagtggcaagatcttggctcactgcaacctctgcctcacaggttcaagccatcctcctgcctcagcctcccgagtagctgggactacaggtgcccgacaccacacccggctaattttttgtatttttagtagagatggggtttcaccatgttggccaggctggtctctaactcctgacctcaggtgatccacctgcctcgtccccccaaggtgctgagattacatgtgtaatccaccaaactcggcccatacagtgacttttgaagtgtccccatggggacctagaagtgcagtggcggctcctattacaatgtggtcactggcctgaaggagccaaatgggagatgatggggagtggacctggggccccctgtgatcaggaccacccaggaagacagcccagggggcctcgagcgatgggcttcttcccacaggagggctcttggagccagtgacaggcaggaccttggagaaagggaggctttggacaggagctgagggcagagagggggcctgagcaaagatgtggtaaaggggccacggtggaggctgggaagctggaaatctgaggcctctagactgggatgcagggcacacggggccagtgcgaagacggaaccggtgctctggcagcgggtgccgtgggctaggatgactttctgtagatgacggagctgggggccatgacctaacaaggggctctgccaggagcttagaagtcctgccgggcagggagggactctctggggcttattgcaatagatgcagtaaaggtctcaccaggtgggagagcccacctaggtggggtgtcccagccacccccagccttggggactcctgggccctcccctgcccagccctgagagactgccctgtctttctgtgcccctgcaaccccgctatcctggccagggcagcccagagcagagtcccacccgcaggacctttctggggacacagtatgggggaggaaacgcggagacgctgggaagagcatttgttacagaggacagtggcctctgcgagcaaaaatcacagaacatcagcctgaagcgggtggctagagagcttttgggggcccccaaactccacacagggtgacctgggggtgaccttggaggcgtggctgctgtgtcctggcttactctgcagtctggacagaggggcagcgcagcccagagaactggtcagccagaccggtgcacaagtgattcctgggggcggaggggtgcaggagagatgtttgggtcccccaaggcctggggaaaatggcccatgagtctgccttcgctctctgaccccagcttccccacagactgggaagaggaagagctcctcatgagctgccttaactcaaggttcccctgaacaccaccacgtggagaaaaagagtgagtttccctggcctccaggcaagaggctgccagcagcccagggcctgggcagccagccagctccccagtgacctctggctcccttcagtcttcagttcccttccccacccgccttcagcagaagtgagaacagactttgggaagggaagggagttttactaagaaactaagagaaaatgctcttgctccccagctgggagaaaccgaaaacagagaggccggtgggtgcacaggaggcagcctccatccccgggaccatgggtagcaaggtgcagaaacggactcatgccagctgggagagggggccaccgaggggtcaacagagccagtctgcagtgacctccaggacacctgcacctgcctccccaccatccttctggccactccctggtcagcagggccactccctcagaccagcttcccaacacacccaggcctccggtgcagcaagtgcctgggaaaggctgagaggagagctgggccggggctgtgagtggcctcccttggtcaggtgttcactcctggacggtgcccaggggcagagagtgtgattgaccggtcaggagccacaggtggcagcagctcccacaggaggcaatggtcacctggtggcaggggacatattcctgaaggaggcagccagaaaaggcattccccacacaaagtgtgggaaactgagccgggccagaaagtgacaggctggtccagcagccccaggctgagcttgggcacaaagccgggtgcagtggcccacagcggagctggcagggccccagcctcaatcccttgcgcccttacatctctctgtgttccggggaatgcctggccccagccctggcctcggggctctgggaggccctgctcacccccaccctccctgcatgtgcaggaggctctgtggctgaactctgcacacacactgcctgcgatgcagctgggtctgctgctggccaaggccagcactggggccagttccctggggaatgaccatccatgtgacctcccaccaccctcagtggggcctgagggacttctgaagggcggtgcttgggcacaccacgctccgggacccaggactccaggacccatcacactccaggaccaggggcctcgtcggtctggggtttcattctggggctgggtgcagccttggcctcccggctgtgaaccatcatgggtggggctgccttttctcagcccagcaggtccccagctgcttggaaaggccccagtgattacatgagggtcacctgggtcatgtaggacgggctcctcctctcaaaatgagaagactcacagccttcattccccttgccgcgtagcatggtgctcacgggctccagaagttacagcgtggacatctttttttttttttttttttttgagatggaatctcactctgttgcccaggctggagtgcagtagcgtgatcttggctcactgcaacctccgcctcctgggttcaagcaattctcctgcctcagtctcccgagtagctgggattacaggcgcacgccaccacgcccggctgatttttagtagagatggagtttcgccatgttggccaggctggtctcgaactcctgacctcaggtgatccgcccatccaggcctcccaaagtgctgggattacaggtgtgagccactgtgccccgcggagcatggacaccttctgcccaccacgtgagcccgggatcctgcggctcagaggtgactgctgagtctaagccctggtctggcttcaaggtccaaactccttccacttctctggggattgagggggagtttgctgtaccgggcctgccggggctctctgggccccgccctggtagctgaggccctggggtgctgcggcctccaggttatctccccactgcaggcacccacccagggagcatcccaggggcctcagggtgggggaggccaggaactaggaggttctcactgcccgagcagaggccctacacccaccgaggcatggggctccctgggctgttctgcttggccgtgctgggtgagtccaccagggacgtgatggtggggctgctgctggggccttgaggtcttgggctcaggtgggggtactgggagcacaggagagatgaggcctgaaggaagggcacctctggaaacatggacagagagggaaagatctgggcttgagtctcggaccagcccctaaacttgctgtatatgtggtccagggatttctgcaccattctgggctcactacttacccatctgcgaaatgggcggatgagaggcgatgttgtggggggaggggcgcaaaagagcttttgtgagtgatggtgccagctgagtcctggggcctcactaccaagaatcagcctgctcctccctcctggcttcagcaggtgggtctcgaggctgtctctggtctcccctccacaccaggccctctccttatcgcccttacctctcttacagctgccagcagcttctccaaggcacgggaggaaggtaagtggcatagcctgctgcagggagaagtcccccagctgggaccctggtgtcagaacccccatggtggagggcgcctcggctgggaagggagttactagtggggaggtgtgtgctggaggatggctggacagttctggaacactctcttcaccctgcagggccctaggagtgatggagatgggcaggccaagcaggccagtgtggggacctccggggcacacaggcagggaagttgctcagcttccagcctttggctgggctgtttggagggaagattccctgggcaggtgcatcctcatcactctgccccaggtccctgatcgggagcagaagccccccctgagaccctcacagctctgcccggtgggcgaggccccgtggagggctggggaattctggtggggcctgggaggttgggattctctgaccaggaggagggccgtgagaggatggtgaagttaaggctcccccaggggcctgacatacacgaggctgccttccttatagaggcaggtggggagtggagagtgtctgggacccagctgggtacaggaccagggaggaggggacgctggggaaggtccctgacagcccctagcctggcctgcttcctcatctttgcctgctccatctttctgcctgcactttcttgccccatccttccctcccctcccctcatgtccattaaggtgaggatggacagtcacctccctatattgtcccaactaacccttgccccttgttgctaggccatcaggttacagagcagggccttccccctctattttgctaaagggcaggtacagggtaatgatgacgccattctcacttgaatgaggcccaggttgaaccattatttcctcatttgctttaaaaacggatacattgttggtgtggctgctaaaaagagagcaggcagctggggctccgggaagtacctgtgcagggcagttccgcctccccctcttggctggctcccgacttctctgattcttgccaaccaagtcctgctaactaaactcctaagagactgactgataaatcatttattcattcaacaaatacttgagcacctgtttggttgcaggcacaattccaggccctgagaatgtggcaaggcactgaaacaaacccctcctgtatcttacattctagtgggggttggggggacagatgataataaaaataagaacattcagtggcttatgcctgttatcccgcactttgggaggctgtagccaaaggatcagttgagcccaggagttcaagaccagcctgaccgacacagtgagacccccatctcttaaaaaaaaaaaaagaaaatggctcgatctcagcttactgcaacctctgcctcctggggtcaagggattcttccacccagcctcctgagtagctgagattacagatatgcaccaccatgcccagctgatttttttgtataaagaaaatatttttttaaattagctgggcatggtgggcggtgcacctgttgtcccagctactcgggaggctgaggtgggaggattgcttgtccgggaagtgaggctgcagtgaaccgtaatcattaacagtgcacttcagcctgggtggcagagcaaaaaaagcacattctaaggtatgttagttagaatgttctagagaaaagcaagcagggtagaaggaaagggaacaccaggtaggtaggggaaggagggcagcatttgcaggggagggtggagtttgggaaggggccgtgcagcaaggacccgaaggagccgaccgagcaggaagtacctgggcagggaccctgtgtggccagaacacaggaagcaaggggcaaagggtattgaatgaggtcagaggcatggtgtggggttggccggggagggccctgtggggcgcagccataggaggtttggaggggaaaacgcaatctgatttacccttggccgaggtcatttggacactgtgtggatggagatcaaaggcaaaatccaagagagccattaggctactcgggatccagaggagagactgggcaatgcgggagaggcagggagatggggtggacatacattctggaggccagcagcagctgctggcagatggcatgggatgggatgggatgaggacagccatgaaagatggcgccaagccgggcgcagctgctcacgcctggaatcccagcactttgggaggccgaggcaggcagatcacctgaggtcaggagtttgagaccagcctgaccaatatggtgaaacccagtctctaatgaaaatacaaaaattagccgggcgtggtggcgcacgtctgtaatcccagctactcgggaggctgaggtgggagaatcccttgaacccggcaggcggaggttgcagtgaaccaagatcgcaccactgcactccagcctgggcaacagagagagactctgcctcaaaaaaaaaaaaaaaaaaaaaaaaaaaaaaggcgccagtccttggcccatctggaaggactggctaaataaagtgcagcctggagatggcatattatgcagctgaaacagcttcagtgggagtggaaagctgggtacacgtgaaggacctgagggatcaggatattcgaaagatgatctctgcgtaggttggctttttgttttgttccattttgcttttagacacagggtctcgttctgtcaccaaggctaaagtgcagtggcacaatcaccgctcactgcagccttaaccgccagggcttaatcaatcctcctgccccagcctcccaagtacctgggactacaggcacacgccatcacacccagctaatatttaatttaatttttttttttttttgagacggggtctcgctctgtcgcccaggctggagtgcagtggtgcaatctcggctcactgcaacctccacctcccaggttcaagggattctcctgcctcagcctcctcagtagctgggactacaggcacatgccaccacgcccagctaattttttgtacttttactagagatggggtttcaccatgttagccaggatggtgttgatcgcttgacctcgtgatctgcccaccttggcctcccaaagtgctgggattacaggcgagagccaccacgcccggaagctaatttttttttttttgagacagggtcttgccatgttgcccaggttggaatgcagtggcacaaactcggctcactgcaacctccatctcccaggctcaagccatcatcccgcctcagcctccagagtaactgggactataggcatgcaccaccatgcccagctaatttttgtattttttgtagagacagggttttgctgtgtttgccaggctcgtctcagactcaagctcaagtgatctgcccgcctcagcctcccaaagtgctgggattacaggcatgagccaccctgcctggcctaatatttcaaatttttttgtagcaattgggtcttcctattttgcccagctggtcttgaactcctggcctcaagcaatcctccctctttagcctcccgaagtgcgggggttacaggtatgagccactgtgccagtgtgttttgaaatccccaagaattctggcaagtatagcattaagcatggtaggaaccatggacaggcatcttcaaggagggataggtgttggtagataattgtaacccagaagacagagtggaatgtatctgaagacataactgctgtttagcaaggagaggggagaaaagtttagggaaggggaaatgtcaagaaggtgttgtccccctttgtcctagccccatgacatgaaggctgccgggatccacatcgcctgggacacctgaaggggtagacagggctctgggaaggagggatctggtttccattagatgtagaggatggagggtgttggttggaaggttgaggatacaggggattttgattccggctgagcctacactccaaacggcacagaggaggccggacacagtggctcacgtctgtaatcgagcactttgggaggccgaggtaggcggatcacttgaggtcaggagtttaagaccagcctggccaacatggtgaaaccccatttctattaaaaatacaaacattagccaggcttggtggcaggcgcctgtaatcccagctactcaggaggctgaggcaggagaatcgcttgaacccgggaggcggaggttgcagtgagcctggatggcaccactgcactgcagcctgggcgacagagtgagactctgtctcacaaaaacaaaaacaaacaaggccaggcacaatggctcaggcccataatcccagcactttgggaggccgaggtgggcggatcacctaaggtcagatgttccagaccagcctggccaacatgcggaaaccctgtctctactaaaaatgcaacaatcagccaggtatggtggtgtgtgcctgtaatcccagctactcaggaggctgaagcacaagaatcgcttgaaaccagaggcggaggttgcagtgagccgagatcgtgccactgcactccagcctgagcgacagagcaagactctgtctcaaaaaaaaaaaaaaaaaaaaaaagcaaaagacaaaagacaaccaaaaaacaacaccaacaaggaaggaaacacattctctgacagtgctggaagctgcattccaagactcagagtctgcagggctgggtcctcccaaggccccgcgggagcacctgctcctggctcctgtcctggtttctgggggttgcctccctcatgccattctcccggtgtgtgtctgagtctcctttcctcttctcctcaggccccaccctaatccagcatgaattactggagttaatatttaacatgagagagggggagccatctgtaaaaacctgatttccaaatatgttcccatgggcaggtcctgggagtcaccattggaacctatctttttggaggacataattcaacccttaacggacggcggcttattcaaagtcagatctcagagcccctccctaggtctaatgagttgcaacctccagggttgggactggaatttctaagcttcctgttgtcacagagaccagtctggagaggggtagcacaatctggaagggccttggagtcactcagagcaccagcaccatgtccgggcctggacatgagccctccacagtttccctgcagtgaccccgtgcccagcctgggcttggcttagcttcctgtcccgagggcagccctgtcgtcactttatcaaattttgagtgtgccatcccattatttaaatgctcttgcagagcagatgaattttatttatttatttatttatttacttacttattttgagacagggtctcgctctgtcacccaggctggagtgcagtggcgcgattacagctcactaaagcctcaacctcctgggctcaaacatcctcccatgtcagcctcctgagtagctggtgcataccaccatgcctgcttaatttttttttttttttttgagacagggtctcactttgtcacccaggctggagtgcagtggtgcaatcttggctcgctgcagcctccaccttccaggttcaagagatcctcccacctcaacctgctgagtagctgggattacaggcacatgccaccatgcccagctaatttttgtatttttagtagagatggggttttgccatgttggcccggctggtctcgaacttctgagttcaagtgattcacccaccttgacctcccaaagtgttaggattataggcatgagccactgcacccagccaattttttttttttttttcttagagacaggatcttgcttttttgcccaggctggtctcaaactcctgggctcaagggatccccctgcctaggcctccaaaagctctgggattataggagtgagccaccacacccagacaagcagaagaattttgaattaaatgataggccaggcgggtggctcacgcctataatcccagcactttggaaggctgaggtgggtggatcacttgaggtcaggagttgtagaccagcctggccaacatggtgaaaccccatctctattaaaaatacaaaaattagccaagcatggtggcatgcacctgtaataccagctactcaggagggtgaggcggagaatcacttgaaacagggaggcagaggttgcagtgaattgagatcgtgccgctgcactcaggcctgggagacaaagcaagagcctgtctcaaagaaaaaaataaattaaaaaaaaaatgatagaccatcctttattggcaggctgatccataaactaaataatcaaaaggaaaaaaccacacaagtcttgagaggatataaagtgagtgtgcggccggggacggtggctcaccctgtaatcccggcactctgggaggccgacgggggtggatctcctgagctcaggtgttcaagaccagcctggccaacatggagaaaccccagctctactaaaaatacaaaaaattagccgggcgtggtggtgcatgcctgtaatcccagctactcgggaggctgaggcaggagaatcacttgaacccaggaggcggaggttgcagtgaaccaagatcgtgtcactgcagtccagcctgggcgacagagcaagactccgtctcaaaaaaagaaaaaaaaaagtgaatgtccctggtacagtgtactttcaaaatggttcctgtctgtgaatttatgcaaatcaagcttctattaatgaagactgaaatggaaatgaagagagagaagtttttctttccatttttgtaagtcaagatcgtttcccttcgcaaagggaacaaaaagaaagggtgatcgcgtgtcagccctggacgcccacttccccacgtgaggcaggcttctggcccctgcgatagtttctggaccatgaagagaaggcctcttggccctgagggtcaaattgactaaagaatcagcagaggcatctgcaagaggatgccccagagggtgccttcacctccagatacaccttcactttcttcaaatcgaagatttttccatgaaagcctgtttagggaaaaaaaaaaagtattccttctttttttttttttttttttttttttgagacacagtctcactctgtcacccaggctggagtacagcagcacaatctccgctcactgcagcctccacctctcaggttcaagtgattctcatgcctcagcctcccgagtagctgggactacaggctcgagccaccacaccgggctaatttgtgtatttttaatagagacagggtttcaccatgttgcccaggctggctttgaactcctggcctcaaacgattcaccctctcagcctcccaaagtgctggaatgacaggcgtgagccactgtgccaggcctgaaaaaaaaaagtattcttccccatctaaaaaggagagtctggctgggtgcagtggctcatgcctgtaatcccagcactttgggaggccaaggtgggtggatcacctgaggtcaggagttcgaaaccagtctggccaacttggtaaaaccccatctctaccaaaaatacaaaattagacaggcgtggtggcatgtgtctgtaatcccagctactcgggcagctgaggcaggagaatcgcttgaacccgggaggcagaggttgcagtgagccaagattacaccactgccctgaggcctgggtgacagggtaagacttcgtctcaaaaaaataaataggtggggcgcagtggctcacacctgtaatcccagcactttggggggctgaggcaggtggatcacctgaggttgggcgtttgagaccagcctaaccaacatggagaaaccctgtctctactaaaaatacaaaattagccaggcatggtgacgcatgcctgtaatcccagctactcaggaggctaaggcagaagaattgcttgaacctgggaagcggaggttgtggtgagacgagatcacgacattgcactccagcctgggtaacagagtgagactccatctcaaaaataaataaataaataaataaatataaaaaggagagttatcatgaaattttcaaaggggcacagatgagaaaataattgttggtgtctgtgcagccctgggcaggggaagacatcctgattctagaaggctgctgccggttgtctagaccagagttgtcaacctcagcactcctgacatttgaggccagaccattcttcgcggtgggggctgactgtgcactgtaggatgctttgcgacatccttggcctctacccactaaatgtcagcagcaacccctatttttttttttttttttttgtggagatggggtcttgctgtgttgcccaagctagtccatctcccaatattgacaaccaaaaatgtccccagacccaaagttcccctggaggcaaaattgctcctggttgagagttactggtctagaatgaaacatgcttagtggtcacacactctagtctattccagttctctgctcaatcagcagtttcctcattgcagggtggtttccagagcagacatgcccagccgagcaaaggcaattcatgacgtcgatgatattcagatttcacagacccttctttctacccctcccccaagcactgccccaccacacagtattctttttttctttttaatttttctttcgattaaatagaggtggggtctcactatgttgcctaggctggtctggaacccctgggcttaagcaatcctcccgccttggcctcccaaagtgctggtattacgggcctgagctactgtgcccacctgatacacactattctttttcttttttttgagacggagtcttgctctgtcacccatgctagagtacaatggcaggatattggctcactgtaacctctgtctcctgggttcaagtgattctctggcctcagtcttctgagtagctgggattacaggcatgtaccaccatgcccagataatttttgtatttttagtagagacggggtttcttcatgttggccaggctggtcttgaactcctgacctcaggtgatccacctgcctcggcctcacagtgctgggaatacagatgtgagccaccatgcccggcctacacactattgttgaaatgcaaacaggtccccgccattggtataatacaaccctctccctcaaacccctattccagaaacatttttgtttaatcccaattgctgtcttaaagaatcagtaatggccaggcacagtggctcacacctgtaatcccagcactttgggaggcccaggcaggcggatcacctgaggtcaagagttcgagaccagcctggccaatgtggcgaaacccagtctctactaaaaatacaaaaattagctgggtgtggttgtgggcacctgtagtcccagctacttgggaggctgaggcaggagaatcacttgaacccgggaggcggaggttgtagtgagccaagattgcaccactgcactccagcctgggtgacagagcaaaactccttctccagaaaaaaaaaaaaaaaaaaaaaagaatcagcaaagacagcatcaggcccactaggaagatctcagagatgttttccacaatgaaattgactccaggatttgcttccaaaacagagaagtcactcgcaagcagaaagcagatacctggcgtaggtgggtgaaggcctgctggaatgcgctgacgggctggttttgatctgggtctagggagaagagcactttgggtgccgtgagcaggctggtctcctgcaggagcctcgcattcttcaaaagtccttttaattaattaatttttttagaaacagggtctcactctttcacccagtctggagtgcagtggcacgatcatagctcactgtagcttcagtctcccaagctcaagtaagtgatcctctcccctcaacctctggagtagctgggaccgcaggcgagcaccaccacacctggctaattttgtttatttatttatttttagagtagttctcactgtgttgttgaagctgatctccgaggctcaagcaatccgtccacctcagcctcccaaagtgctgggattccaggcgcagtggccaccgtgcctggacacattttgtttatatagaaaaatattctggaaagaaacagcctaaacccaggaggtagccctttttctaatattttctttttttagaggtgaaattcacataacaaaaagtcaaccatttaaaagtgataattggccgtgcacggtggctcacgcttgtaatgccagtactttgggaggccgaggtgggtggatgacttgaggccaggagttcaagaccagcctaaccaacatagtgaaactccgtctctactaaaaatacaaaacttaggccgggcacggtggctcacacctgtaatcccagcactttgggaggccgaggcgggcgcatcatgaggtctggagttcaagagcagcctggccaacacggtgaaaacccatctcaggtgcctgcgtactaagacctgtgttcagcagcggcggcggcggcggcggtgggctcggaggctcacagccagtggacagggttgagtcagtgagttcgtgcgagttggaatcgaagcctcttaaaatggcagatgatttggacttcgagacaggagatgcagggcctcagcgaccttcccaatgcagtcctcagcattgtgtaaaaatgactttgtaggccgggcgcggtggctcacgcccgtaatcccatcactttggaagaccgaggcaggcggatcacaaggtcaggagatcgaaaccatcctggctaaaatggtgaaaccccgtctctactaaaaatacaaaaattagccgggcgtggtggcgggcgcctgtagtcccagctactctggaggctgaggcaggagaatggcgtaaacccgggaggcagagcttgcggtgagccgagattgtgccactgcactccagcctgggcgacagagcgtgactctgtctcggaaaaaaaaaaaaaaaaaaaaaaaaaagaatggctttgtggtactcaaaggccggccacgtaagatcgtcgagatgtctacttcgatgactggcaagcacggccatgccaaggtccacctggttggtactgacatctttactgggaagaaatatggagatatctgcctgtcaactcataacatggatgtccccagcatcaaaaggaatgacttccagctgattggcatccaggatgggcacctatcactgctccaggacagcatggaggtgcgagaggactttcgtctgcatgagggagaccttggcaaagagactgagcagaagtacagctgtggagaagagatcctgatcatggtgctgtctgccatgaccgaggaggcagctgctgcaatcaaggctcccagggtggcggtggtggcagcagtgatcctcccaagaggccccctcccccaggctggcttggctctgccctggtcctaggctgctggactcctcctacacattttttttttttgagatggattctcgccctgtcgcccaggctggagtgcagtggcaccatctcggctcactacaagctccacctcccgggctcatgccattctcctgcctcagcctcccgagtagctgggactacgggcacccactgccacgcccggctaattttttgtattttttagtagagacggggtttcaccgtgttagccaggatggtctcgatctcctgacctcgtgatccacccgccttggcctcccaaagtgctgggattacaggcgtgagccaccgcgcccggcctcctcctacacaatttatttgatgttttattttggttttttgcatcacctcaatctgttgggggagcccctgcccttcacctagctcccttggccaggagcaagcgaagccgtggctttggggaagctgccctcctcttccccctcacactacagccctgctcggggagaagggggtgggtgctgcttgtggtttagtttttgtttgtttgtttttgttttttaattcaatctggaatcagaaagcagtggattctggcaaatggtccttgtgccctccccactcatccctggtctggtcccctgttacccatagccctgagcaccaccccaaaagactggggaccagccccgtcccctgcctgtgtctctccccaaaccccttcagatggggagggaagaggaggagaggggaggggacctgccccctcctcaggcatctgggagagccctgcccccacgggctttacccttccctgcaggctctctccccgacacatttgttaaaatcaaacctgaataaaactacaagtttaatatgatttaaaaaaaaaaggaaaagaaaaaaccccgtctctactaaaaatacaaaaattagctgggcatggtggtgcatgcctggagtccccactacatggtaggctgagacaggagaatcgcttgaacccaggaggtggaggttgcagtgagctgagatcgtgctactgcactccattctggacgacagagcaagactctgtctttaaataaataaataaaagtgggccgggcgcagtggctcacatctgtaatcccagcactttgggaggctgaggtggccagaccacctgaggtctcgagttcaagaccagtctggccaacatgatgaaaccccatgtctactaaaaatacaaaaattagccaggcgtagtggtgggtgcctgtaatcccagctactctggaggctgaggcacgagaatctcttgaacacgggaggcgacagtgcaagactctgtctcaaaaaaaaaaaaaagtgataattcagcagcatttagtgcatccatagtgttgctcaaccaccaccgctatctagttccgagagattttcatcaccccaaaaggaaaccccgtatctattaggcagttactccccatttccccctcccctgggccccagtaaccaccaatctgctttctgtctctgtgggttctcctgttctgaactttgcacacacatggaatcatgcaaccgttgccctttgcgtctgcctttttgtttagtggaatgttgttacggctcatccctgttgcagcctgcatctgtgctcatttctttctaaggctgagtaatattccttatatggatcaaccacattctatttacccattcgtccattgatagatatttgggccgtttccaccatttggctgtggtgaatcacgctgccatgagcgtgtgtgtacaggtatctgtttgagtccctgttttctattatttggtgtatgtctaggcctggaattgttgagtcatatggtaagtctgtttaactttttgaggaaccactaaatcagtattttctttctttcttttttctttactctgaggtctactggtttcacttatttatttgtaatttttaggttcaggggtacatgtgcaggtttgttatagaagtaaattgcagccgggcgcggtggctcacgcctgtaatcccagcactttgggaggccaaggcgggtggatcacgaggtcaggagtttgagaccagcctgaccaacatggtgaaaccctgtctctactaaaaatacaaaaattagccaggcgtggtggcacgcgcctgcagtcccagctattcgggaggctgaagcaggagaatcacttgaactcaggaggcgaaggttgtggtgagcagagatcgcgccactgcactccagcctgggtgacagagcaagactccatctaaaaaaaaaaaaaagagagagagagagagaacatgctaaacccagcatcctttttctttttttcctgagtctccctctgtcgcccaggctggagtgcagtggtgtgatctcggctcactgccacctgccacctccgccttcctggttcaagagattctcctgccttagcttcccgagtagcagggattacaggtgggcaccaccacgcccggctaatttttgtattttagtagagacagactttcaccatgttggctacactggttttgaactcctgacctcaagtgatccgtccacctggacctcccaaacactgggattacaggtgtttgccaccgagcctggccaaaccagtaccttcttaaggtgcttgatcaatgtcggtttctttcttcctccttggaccttttcatctcccagaaattacccctgtggtctccattgcctacaaagtcctggaagttttccccaaaggccgctgggtgctcataacctgctgtgcaccccagccaccaccgcccatcacctattccctctgtggaaccaagaacatcaaggtggccaagaaggtggtgaagacccacgagccggcctccttcaacctcaacgtcacactcaagtccagtccagacctgctcacctacttctgctgggcgtcctccacctcaggtgcccatgtggacagtgccaggctacagatgcactgggagctgtggtccagtgagtgcggtggggggcacagggctgaggaggcaggtggggtgcagatcaatggggagctctgggagtggggattgtgaaccttgctggggttagagagagccagggtgtgagggtgtggacaaggacaggctgccacctccaaggccattctcagtcccttggggcctttaatcaggacttgctgtccctggctggggccctgagggcacagtctcctggcaggggcctgagggcacagagggaaagagcccgatggtggcagaaatgactgggccccagttgtcagctcggacctcaaggtgataaactaggcacgtttgtctgggcgcaaatcccagcactgtgggaggccgagacaggctgatcgcttgagcccaggagttcgataccagcctgggcaacatggcgaaaccctgttcctactaaaattacaaagattagctgggcgtggcggggtgcacctgtagttccagctactcaggaggctgaggcaggagaatcgcttgaacccgggaggcagaggttgcagtgagccaagattgcgccactgtactccagcctgggtaacagagcgtctccaaaaaaaaaaaaaagaaaaagaaacgaaaaaaaagttaggcacgttttgtgcattacttcgcttgatcttcacagcagtgtcaggggtggggtctgagcctctgggtctatagctatgtaagctaaaactctggggagttaagaaagttgccccaggggctgggtgtggtggctcacgcctataagcccagcattttgggaggcccaggcgggaggatcacttgagctcaggagtttgagaccagtctggccaacgtagtgaaaccccatctctactaaaaatacaaaaattagctgggtgtggtggtgggcacctataatcccagctactggggaggctgaggcaagagagtcacttgaacccaggagatgaaggttgcagtgagccaaggtcgtgctgctgcatgccagcctgggtgacagcgtaagactatctcaaaaaaaaaaaaaaaaaaaagtcgccccaggccacatggctggcaagtggccaaggctgctttcaaaccccactctgtccagctccaaaccctgccttcttcctgtttccatcctgatagtaactcaggtaaccttcttggtgggagctatggggtatgggaaccaggaagtgttgcccgacttagggtgggacaaggaatcgccccattcatcctttggcccgcaccctaagaacaccaggaaaagacagcctaggggagatgagcccaggatctgcagcccaacgggtccaaggttcaaatccctacacttactggctggggtcttgaacaactcattggaccgctgagcttcaactgctttatctgcaaaaggaaaataataacagaggccagtgaggtggctcacacctgtattcccagcattttgggaggccaaggtgggagaatcctttgaagccaagagtttgagaccagcctggaccacagagtgatactctgtgtctgcaaaaaaattattttctttttttgagatggagtcttgctctgtcgcccaggctgaactgcagtggcacgatctcggctcaccgcaacctccgcctcccagattcaagcgattctcctgcctcagcctcccgagtagctgggactacaggcccttgcccccatgccggctaatttttgtatttttagtagacacggggtttcaccatgttggccaggctggtctcaaactcctgacctcaagtgatccacctacctaggcctcctaaagtgctgggattataggcgtgagccactgcacccagccaatagcaattttttaaaaaattaatcaggtatggtggtgcatgcctgtcgtcccagctacttgggtggctgaggtgggaggatcatttgagcccaggagttggaggctgcagtgagcggtgatcacaccattgcactctagcctgggcaacagagaccctgtctctaaaataataataggtcctacttcaggggacctattaaatgaaagccttttagtaggtggcaagtgtggtggtgattactcatcagtaagaatgtctagagcattaggctcaaggcctgggggattctagaatcttctacatgacagtttttgtcctgaagtagcttgcctttcagtaaaaaagacgagactgaatgatagagttgccagataaattttacataggacatacgtatagtaaaagattattcattgtttatctgaaatgaaaatttaactgtatttttatttgctaagtctggcaatctgaaatacgctacacaagaataaaaccaggccgggcacggtggctcacgcctaaaatcccagcactttgggaggctgaggcagaagattgcttgagcccaggagtttgagaccagcctggccaacatggtgaaaccccatctctgcaaaaaatacaaaaattagctggatgtggtggtgcacacctgtagtcctagctactcgggaggctgagatgggagaattgctcgagctggggaggcggaggttgcagtgagcctagatcgcgccattgcactccagcctgggcgacagagcaagaccctgtctcaaaataaagtaagaataagataaaaaccaaatgtgaaattgtgtggtacacacggcaggtagggcagcagcccagacacaaggtggagggcaaactctagaaggcggcctggaggaggcggcagccacagctaagctcattaggcattttgtaatgaggagaacttactgaggaggaggggtttaaaaccgctcagccatgcctgtgctaccttctcccaccctgccagagccagtgtctgagctgcgggccaacttcactctgcaggacagaggggcaggccccagggtggagatgatctgccaggcgtcctcgggcagcccacctatcaccaacagcctgatcgggaaggatgggcaggtccacctgcagcagagaccatgccacaggcagcctgccaacttctccttcctgccgagccagacatcggactggttctggtgccaggctgcaaacaacgccaatgtccagcacagcgccctcacagtggtgcccccaggtgagagggcccttggatttccagaggggcagctggcgcttctgtgccgggagggtgctagtgtccaagacacaggtcgatgggaagtgggacagctctacccggccactgctgagagcagagagggcacaggaggcaaccatgcccaccctggcccctgcctaaaggaagcccaacccagctgcctccgccccctcccaggagggttgcccagggcacccaccatcgtgctggttggcagccttgcctccactgcggccatcacctccaggatgctgggctggaccacgtgggccaggtaggaaatgggtgctcgatgcagggaggagggagagctgctgatggcctgagaggtccaaccgggccctggctgcagagctcaggtggtggggcttgcagggcagggctgtggccagggcaaagagcggccatcaccgcttacgcatgactcgaaggtgtttatgaggacctactgtgtgccatgtgcctactgaggcttacacattcaaggcgttatcggaccctgaccagtgctcccaggtgccctgtaacacagtctgctggcctctgggagggcagtctcctaagttctttatggggtctgagcagggattgcagggatgatgcctccaggagaccaaggtggaccaggagctcctgccttctgtgagaaccaccttgggcagtctttccgaggtggtggcaagagcctggggcccagcctcccagggtcccctctccaaggccatggctttactaacatgtaaagtgaccaaggcctttgtagtgtctgagtgcaggcaccacaggcctgtgtgctctgcctgtctggctttggtggtggccagccctgcctctgtgaactcatctctctttgtttgggagacactgccgtgtcctggttctcatcctctgcccgtggcccaggcccttacgtggctctaccaggagtctgtccttggcactttcccatctcacttctaccaagtctgttctttccagaagccagactcgtgggtgagccatgtcacctcgccgagcctcagtttttccttctgtaaaatggggtacagccttcatttagtggggtgagtaagcctcatgtctcttctgctggggcactgatgtgcttggcaccataaaactcccagaggcaggccgggcacagtggctcatgcctggaatctcagcactttgggaggctgaggcaggcgaatcacctgaggtcaggagttcgagaccagcctggccaacatgaagaaaccccgtctctactaaaaatacaaaattagccgggcgtggtggtgcgcacctgtagtcccagctactcgggagactgaggcaggagaatcacttgaacccaggaggtggaggttgcagtgagccgagatcgtgccattgcactccagcctggacaaaaagagcaaaactccgtctcaaaacaaacgaacactctcagacgcctcgggaggggatggctgggaggtgagcctgcctgacttgagtctccactgctttgtcaaggtggtgaccagaagatggaggactggcagggtcccctggagagccccatccttgccttgccgctctacaggagcacccgccgtctgagtgaagaggagtttggggggttcaggatagggaatggggaggtcagaggacgcaaagcagcagccatgtagaatgaaccgtccagagagccaagcacggcagaggactgcaggccatcagcgtgcactgttcgtatttggagttcatgcaaaatgagtgtgttttagctgctcttgccacaaaaaaaaaaaaaaaaaaaaaagggtaactatgagagatggtggatatgttaacttgcttcgctataggaacctttgtgctatctatattatctatatgaatcccatcatatcaggttgtctaccttaaatatacacaaaaacatttatttaaaaaaaagaaaaaagcctgccagctgggattcttggagtgctggtggccttcagcaaacacagacactgttggtgtgagggcttcaggagggtcacagaaataagggggtctgtgtggccctgtcctcgcctctcaggtgctgtcacatctctctgggtgtagggagagggaggggggcacactgcgaaaaggcccagcccctcccccccacctgctcccctcttccctggagaggcaccccacctcctggtggcccagtcctatggttcaactctcacgtggtccagctcacctgggttgactgtgagccccacctggcacacctgctgttgttaatctgcacctgcaactagcaaaggggggtctggaattcttccgggttcagtcagcctgtgatcccacacctctgtctgtacaacctccgctccccactccaacacacacagagcctgccccagcctaccctgcaccagaccctctgtaccggtttttcttgggatggaggtagagagggacggaggcgagagggggctgaactggaactggattaaactttgccatctgcctgtcgccctgaaaacttcatttctgtttgcatgccatatatatatttttttatatgtggtcttttctttttttttttttttgagatggagtctcgctctgtcgcaatggtgcaatctcggctcactgcaacctccgcctcccgggttcaagcgattctcctgcctcagcctgccaagtagctgggactacaggcacgcgccaccatgcccagctaatttttgtatttttagtggagacggggtttcaccatgttggccagggtgttctcgatctcctgacctcgtgatccgcctgcttcagcctcccaaagtgctggaattacaggcgtgagccaccacgcccggccgatatgtggtcttactctgtcacccaggctggggtgcaaaggcgtgatcttggttcactgcaaactccgcctcctgggctcagacaattctcccacctcagcctctggaatagctgggactgctagtagctgccaccacgcctcgctaactttcgtttttggttttgtttgtttgtttgtttgtttgtttgttttgtttgttttgagatggactcttgctctgttgcccaggctggggtgtagtggctcgatctcagcacacggccacctctgcctaccggtttcaagcaattatcctgcctcagcctcccaagtagctgggattacaggcgcttaccacaacgcccagctaatttttttgttgttgttgtatttttagtagagacggggtttcaccatgttggccaggctggtctcaaactcctgacctcaggtgatccaaccgcctcggcctcccaaagtgctgggattacaggtgtgagccactgcgcccggccttgcacaccatctttttttttttttttttttttttttttgacacagagttttgctcttgttgcccaggctggagtgcaatggcacaatctcggctcaccgcaacctccacctcccaggttcaagcgattctcctgcctcagcctcccgagtagctgggattacaggcatgcaccaccacaccaggctaatttttgtatttttagtagagacggggtttctccatgttggtcaggctggtctcgaactcctgacctcaggtgatccaaccgcctcggcctcccaaagtgctgggattacaggtgtgagccaccgctcccggccttgcacaccatcttaagtgtgacgccacactgcccttcacagccttggggctctgcccagaccaggaggaatggggagggggtctttgaccctaccccaggcttagccccagagaggaggaaagagtggcaggccaggcagggaggggctccagggtgtggcctgggtttttcagtgggatgggggaggggttgcttatgagcctgggtgggttcttggtaggtggtgggcttcctagaggaggcggtgggagggcaggggcaaagagggtgagcggtcctcagttcgtccgtcttcccgggggactctctgaccctttctggtccgtgctgcggccggcgtggcccggagactagcccctcaaccccgaggtggggtggacccgggtgctccgcggccacagcccctccccgcctctagaagcgcagtcccgcggctcgcccgccgctcgcgagggccgcactttgccctcggtccctagcggcgcctggccacgcccccggcgggtggagtcgggcggggcgccgggcaggttcctctgcgttccgcggcggcggcagcggcggcgacggcgacatggagagcggggcctacggcgcggccaaggcgggcggctccttcgacctgcggcgcttcctgacgcagccgcaggtggtggcgcgcgccgtgtgcttggtgagcccggggagggcgggccgagggcaccctggggaccccctctccgtcgccaggcccggcggggcccctagcccacgagcgcgacaggtggcggcggccgcgtccggggcctggcggcgagcggggccggcgtccagcgtcccgggccccgccttcccgccctccacagtctgtcccgctgtcccctcccggtcccgggtcccgccacccaccccacccccagcctcgcgccccgacgcggggtgtccggatctccgcagggagcgggcccctgcctcgctggcagtgggaggagtttgggggcggctcccggacaggtggcccgcacgccgcgactcccagattggggagttcaccgggacggggttttccgaagccacgtggggtaagggagggggcggggggcgacccaacgcccggaaacagggtgtccttcccactcggggcaggccacgggtccgccttcccacccgaagttgagggaccccaagatgtaccccctccctgtaaggtgggcaatacctccaaaaccaggttttgtgtgtgtgtgtgtgtggcggggagggggcctgttcttggacagccagccctgaaagctggagggggtggcatgagggggcaggcagaggtgggcctgctgtgcccagaccatgcctgggcctggagcttctgaggtcctccagggcgcccacaccagctcccagccaggctgtgggatctgatcgcctctgtcctgggctgtgtccaagaatcaggtgcccagtgggtcgggatggcagtgccaggagtcctggatgggcaccctgctcccatcatcccggagatccggcttcatctccatctgggggcggggcctgtgactgccagctccagagccctatggagagctccctgggacaacagggcaggactggcaggggagagtcctggggccatcccagagggatcctgatgctcacagacctgtcccacacctgctgaggtggagcaggcgtgggtggtggccttcaagtttagggaggtggtatggggctcttcccaaggggctggagctcccctacatccaccctgggtcctccaggtgtctgagttcagagctgtatccacaggcctgagttagtccccttgtagtgccctgtgcatgcagggccctctgtggggtgggagacagactgggagggaccaggatgccacagaggctgcaagtccttgtgtggagacagctggccaggctgaaccagggagggttccaggggttccaggaggtgaagacacaggggcgccagcatggccttcccaagagggcctgtccaccttcaccaaggtgttcaggcagaggctgggtgctgtagaagtgacttgggctgaaggtgacgggggatgggtagtctttgtgacttggcctgtcttggttaaacctctttcaaggtgaggttgggctggggatggaaggactgcccttcatccatcaggtacctaagcagaatgattcctgcagcaggccgatggggcaggagcagcccctgcctaggaggtccctgcccattccccacccctccccggtccaggattcccaggggcaggccccctggtgcctgcagattctcatcctggggtgcatcaggaagcactttgctcatcagctcacctccacaagtttggaggggctaagatgtcagcctccaaaaggggacagcaggctgggcgaggtggctcatgcctgtaatcccagcactttgggaggccgaggagggtggatcacctgaggtcaggagttccagaccagcctggccaacatggtgaaaccctatctctactaaaaatacgggtgtggtggagggcacctgtaatcccagctactagggaggctgaggcagaattgcttgaacccaggaggcagaggatgcagtgagccgagatcgcactattgcactccagcctgggcaacaagagcaagactccatctcaaacaacaacaaaaacccaaaaggggacagcagtagtgggagaggccagcatctgtacaccccatcagggtccccgctgtgtgtgcccctcaggcggccaccagccctaccaggtcctcccctcccggcaggtcttcgccttgatcgtgttctcctgcatctatggtgagggctacagcaatgcccacgagtctaagcagatgtactgcgtgttcaaccgcaacgaggatgcctgccgctatggcagtgccatcggggtgctggccttcctggcctcggccttcttcttggtggtcgacgcgtatttcccccagatcagcaacgccactgaccgcaagtacctggtcattggtgacctgctcttctcaggtatctgcctgtggcacctccatttgatcttgggggaggcattaactctagggttccgcagctgggagggtctcggcctctctgggaggggcagggagcagctcactcctccagggcatttttaggaaagggttttcagctagtgtttttccgtgcttgaatggcaccagccctgcctggggtagctagaagctgagtggacctgcagcacacccgagcagatgggctttgcctctgccccttttgtcccctaggctgtctgctgtggcccaccctgccaaggcccgagtgtgggggactttggaggtggctcccggcccggcttccaagtcctcccctccatagtgtggaggctcccccgggaggtccctgccctacctgcccgcgtcccctcccagagtcctggaaagcccctccctttccatggaactgacgcttcacccgtcctcccccagctctctggaccttcctgtggtttgttggtttctgcttcctcaccaaccagtgggcagtcaccaacccgaaggacgtgctggtgggggccgactctgtgagggcagccatcaccttcagcttcttttccatcttctcctgggtaggatggccaggggccggttcttgggtcaagggtggtggagggtggggtcccccacccacctgtaccctgctgtgctccccctgcagggtgtgctggcctccctggcctaccagcgctacaaggctggcgtggacgacttcatccagaattacgttgaccccactccggaccccaacactgcctacgcctcctacccaggtgcatctgtggacaactaccaacagccacccttcacccagaacgcggagaccaccgagggctaccagccgccccctgtgtactgagcggcggttagcgtgggaagggggacagagagggccctcccctctgccctggactttcccatgagcctcctggaactgccagcccctctctttcacctgttccatcctgtgcagctgacacacagctaaggagcctcatagcctggcgggggctggcagagccacaccccaagtgcctgtgcccagagggcttcagtcagccgctcactcctccagggcacttttaggaaagggtttttagctagtgtttttcctcgcttttaatgacctcagccccgcctgcagtggctagaagccagcaggtgcccatgtgctactgacaagtgcctcagcttccccccggcccgggtcaggccgtgggagccgctattatctgcgttctctgccaaagactcgtgggggccatcacacctgccctgtgcagcggagccggaccaggctcttgtgtcctcactcaggtttgcttcccctgtgcccactgctgtatgatctgggggccaccaccctgtgccggtggcctctgggctgcctcccgtggtgtgagggcggggctggtgctcatggcacttcctccttgctcccacccctggcagcagggaagggctttgcctgacaacacccagctttatgtaaatattctgcagttgttacttaggaagcctggggagggcaggggtgccccatggctcccagactctgtctgtgccgagtgtattataaaatcgtgggggagatgcccggcctgggatgctgtttggagacggaataaatgttttctcattcagtctccagtcattggttgagccacagcctaggggttggaggaagactccactctgggtacacccttaggggctggctttatggaacttgtagtttgaacaaggcagtggcaatccgccccctccagcctgcctggctggcccccttccctctgtctggggtcgcattccgcacaagcctttcatcaacatcttaaaatagtaactgtgctcagcttgtaaacaagatgatttttctggcctgcagtgccagggtcctgctgctcccttcctagagtgggggtgggggtacctgggagttgtcggtgaatgcccctttcttgcactgaataggggtaccataggtaagaccaggtttctaccttcctccagggtcagcacctctggagccttcctgggacacggccttggccgtccagcccacccctcggagataaggcccatctctggaagaggtcaaggccctaaagcaacttctggcttcttcttttgagcaatgacagagggagctgtcatcggcaagtcccgattgtttaaaaatccccagtacgaactaacagggcactgctcccagcctcacccgatggctttggcttgggacacatcactagcgaaggggagagggaggctggggaggccctgggagtggtgaccctgcctgcacaggacacaccttaccccagcgatgcttgcccccaagtgagctgccaacagcccatctctgaggcacagctgagagatgtcttgactcctgaattaccaagagtttgtttcacaaacaaaacctgacctcacaggcccagcgggcaggacagtgcctcttccttccaactgggccccgggctcctctgtacacccatttttgtcctgacactggcccagacaggaaggcagatgatgttctgcttaggacacaccccatgatcatttctcagttcaagggttgtggttaagagatcagtattactacagaaagatctgggggccaggtgcagtgcctcacgcctgtaatcccagcactttgggaggccgaggcaggtggatcacttgaggccaggagttcgagaccagcctggccaacatggtgaaaactcgtctctactaaaaatacaaaaattagccaggtgtggtggtacacgcctgtaatatcggctacttgggaggctgacgggggagaatcacttcaactggggaagcagaggctgcagtgagcagggattgcgtcactgcactccagcctgggcgacagagaccctgtctcaaaacaaaagaaaaaaagatctggaagaaaatccccacccaaatcaagttggagctgtccatgagacccagggaaacccaggtgaaagagaaatgtgcgtccaccaaccagtgaattttcaattagttaatttcataagctacagcagaggcgtggaccctgccctctccacacttgaagagataagcccctgggatccaagtcccagcaaggttggtgccacccatcttggtgaaagatgctgttgttcctgtggaaaccatcaccagaggtaggaagggctttgagcccaaaaggaaacaagagggcgtgaatccaggccatcctcaggggagggtgggagcccatcccaggcagagaggcctaagcctcagtgtgggccaaggctcaaaggtgctggcacaggcttcccagggagaacagaaactcagcagtgaaagccgcagaggggaagaagcaggctgatgtcaacagcgtggggctctgtccctcaccccaaggagagggagtgtgccagatcccaggccaccaagcggggccagctccagcctgggcgatcgtcccagcagctgagagggaagctttaagcagaccagtgggtaggagaggagggagcatgcggcaggtggggcagccacacaaaggagagttcccagaaggccaaggtgtggtcaccctccacgcctcccgacttcctcctggagtggctgggcagcatgcagggcagcgtccagtaggcggcagtggcaggaagggagcgggcggccctcgcaggtccctcagttggcagggctgcattgcagaatctgctgtggggcaaagagcttcctggcagccacggcttcccctggctttcctggcactgggcagttctctttgttgtccggcccggcaggctggcctgaggccttcttgaagtagcagagccgacacacggagtggtacttgtctgctcccccaatcacctcgacctggccgcagggacaggggatgggtgaagggccaggacaggaaggaggcagagccatacccccaccccgccggcctgcagggaaggcaggtggagctacctccttctctgtgccgagcctcttggtataggcggcttcccggaagcactccatgcacaccgccgtcagcttcaccacgctctcggccagcggcaccaggttcaggatggccccaaatggctgcgctcccatggaaagacagagggcgctcagccaccttaccaggtgggtttttcttttaaaccctctgattcacaagcactgaagccaggagagtttgctctgaccttagtccttcccccaacccccagagcaccatgcccggctctgtccctttgccaattcaaagcacctgccgcaacagatggcacgcagtctgcacagaccatggagtcccttggctcagccaaggcctgagcagctcggccgtaaccctgtggtggctgagccctggtcacccagagctggtgtctctgtgcccatccagaagcctcttgccctcctcaatcccagctccagacctggatcagacgccttaccttcctctggaaggtcccatccagtgcagccacaattacggtcttcccggcgttggccatggcctcgcagaactccacgatgtcagggaactggaaagggcacgtggagaaagagtgtgagagcttccaccccagcagcagctccctggagccccagcgaagacgctgccagatctgacaactccggccatttggcccggagtaactcttaattctcccacgaggctccccaggccgggggactgtgtccacccgcacgccccccagcagacgacaggtacatccacaactgcgcagccccttccccctgcagccagcttccctccgagtccaggtacccaggactcagcaccggacttccacaccagctgtgctgtttaacactgcagtggccaaaggcctgctgccttgggctcggacaccactcttcgctggacccattatctgtgtgaccttggcaatgaattaacgtctctgaacctgtttccttttccttaagagcaaggaaggtcctgttgtttaaggatggaaggccctaagttatatacatgctcttcggtgaataggtgggcgctttgtgctcttgcctcccccgttttaaacgggtaatgtgccttgagaaggggcgggggtcctactggccatttacagagcaggatgacacagcacagccttctaaattcaggacctgcacagagcacatttactgtgtaaagcaaacttcactttggcccagggagaagctgaaactctggcaagtgctctggtgattctcatcaatcaatcatatcactcttagctggttgagttcatatgtccagactggcctttgggttgggtgaagcagggatgtccttgtccttgggtgcagggtctctctcccagggccactcaggctttctcagcccaggtactgaggtttgaggttattgagacgtgagggcttagcaaggtgaggactaaggggtggctcgaaaaattccagtgagatccaagcaaagcccaacgtgactgattgcgctcagctgactgcaggggtctctggagaaggaaacccagagactccagcacgccagggcccctccccaccatgcactcgttccctctttttctctgaggactcatgacatgtcacgaaaatgcagctcccagcctgcaaggagctgtgggccggcacaccacctgcgccaggggcgcgccccctggagggctgacgctgccatggctgccatttgaggccggatctcgctgtgtcctgtgcagtgtagggtgttgggctgcgtccctcgcccccacccattagatagatgccaggaacacacctcccaccccccagctgcgacaaaattgtttctagttgttgtgagatgtcccctgggtgggaatggagaggggaagaaccctcctgagttgagaaccttgctccttcacccgccacatgagggtagaaggcagaccccagactctcctgcatcagggtttcaggatgaaggtcctcagcccccactcactccacctcttgaccaacctcaggctgaggtccatagtcaaagagcttggttcttgcacccggcacttccccacccgtccagcacttccagtgatctgcctgcctcagcctcccaaagtgctgggatcacagacgtgagcctctgtgccagaccctaacttttcctagattaaacttattatagattgcatgtctctaacctgaaaggctccaaaatctgaaactttttgagcgcccaccacaagtggaaaattccacacctgacctcatgggacaggtcacagtcaaaaactgtggctcacgtccaaattactaaatacataaaattactctcaggctatgtgcctaagatgtctataaaacataaatggattttgtgtttacacttggggctcattcccaaggtctcattatattatgaacatgcaaatattcgaaaacctgaaatccgaaacacttctggtcccaggcatttaggttaaggaatactcaacctgtattacttgtgtagtagaacagaaaacacaaaaaggtctattttttttttttttttgagacggagtctcgctctgtcgcccaggctggagtgcagtggcgtgatctcagctcactgcaagctccgcctcctgggttcacgccactctcctgcctcagcctcccgagtagctgagactacaggtgcccgccaccacgcctggctaatttttttgtattttcagtagagacggggtttcaccgtgttagccaggatggtctcgatctcctgacctcgtgattcacccacctcggcctcccaaagtgttgggattacaggcatgagccactgcgcctggctttgtctattttttttgagacagagtctcgctctgtcatccaggctggagtgcagtggcataatcttggctcactgcaacctctgcctcccaggttcaagcaattcttgtgcctctgcctcccaagtagctggaattacaggtgtgtgccaccacgcttggctaatttttgtatttttagtagagatggggtttcaccatgttggcctggctggtctcaaactcctgacctcaagtgatccgcccgcctaggccttccaaagtgctgggattacaggtgtgagccaccgtgcccagccagaaaaaaagtttaaaaaaataaatcagagctcctactattgccaagcgaccctgcaagcccaccacacactgtgcagctgttgatgcaagggtgcccacccaccaccagcatctgaagcacagcacccccagctaggagcttcaggttttccagagatttccaggtgagtctctcttggatgccaacagtttctacagagcagtgtgagcacctgtgtgtctcgcccggggtacaaagaagcacagaagcttctgacccagggccttcctcaggatggcacggtggctactctgtgaaaggctttccctgctgacccagaaaacgggaacaaggcaggttcggctgggcttcatccactgtccacgtagacaatgaaggagcgaaggacagtccttctgctgggtcccatgctaggaacccctctcctcgatctagaactgcttgcaatgggaagaccctgaacttcttttgttttgttttgttttgagactgagttttgctcttgttgttgcccaggcttggagtgcaatggggcgatcttggctcactgcaaccttcgcctaccgggttcaagcgattctcctgcctcagcctcccaagtagctgggattacaggcatgcgccaccacgcctggctaatttttgtatttttagtagagacggagtttctccatgttggtcaggctggtgacccggaacttcttgaagagaacaagggcacacagaggccagggcagaatgctgatgtctgggtagggtgtaataaatactcactgaatgaactcaagttttacttgctggccagggaggaagtagaccgagaaatccctcctataggctgaacaggggacaggacttcatacgctggctcctgactcagggcatttggatgtcgaggaaggagaagggaaaggtttctgcctcgggggtctgggtcagcctctgtcaacaaggtttacgcagagccaggagaacagagctattgaacaactcacagcggcaggtctgaaggagggagagccttgccaaagctgaagcttccttgttctgagagggccatgtccccaaagctgatgcaaaatccctggatgcattctgaggccacagtttgggagcaaaagagaacagctgcagccctattcccagcctgggctcactttctcgccaggagtccctcaagcacggggcagcaacaacgacgtctccacgtacgcagaggcatgggggtgctcaggggcgcacctctgaaggtcagaaacggaatggccatacccaagcggggaggagatgccagctgccgggtggtcgggaacccagagcggacactggcagcctcaactccacagggcagatgccccgcacaggggaagggacccgtcagcctccccacgggaatggaatttgcagctgtgactcatacagaatgttgggcaagaacagaaccaggaaggcaggactggccttttgaggggacaggccctgtgacgtccgggcagggtattcaggccagagcggcctggctctgtgctgggaggcagggcgggtagagacctcgaagcactcaccaaaccaactcatttattcttcctccagggtatagaactagactaagtgtggccaggcgtggtggctcacgcctgtaatcccagcactttgggaggctgaggcaggcagatcacctgaggttaggagttccagaccagcccggtcaacatgatgaaaccccgtctctactaaaaatacaaaaggttagctgggcatggtggcagaagcctgtaatcccagctactcaggaggctgaggcgggagaatcacttgaacctgggagatggaggttatagtgagccgagactgcgccactgcactccagcctgggccacagagcaagactgtttttaaaaacaaacaaaaaacgaactggactaagtatactaaacgtataggtggccctgtgcccaggttctagtctttgaaagatcagcagaagtgacgtttgcagcttctggtcaggcccatgaaaacctcacacccaggggctccgccacgtctcttcccctccgtgtctgtatacagccagccagggcgacctaagccgcctcgtgggcggcctccccatcaaccggcctggaaccacgtagggggtctgtgagcgagaaataaattcctgttatgtttatatcaaaccaccacattgtgtacttcgaggcaaccctaaaagtacctaagaggtcaagtctgctaaaccccttggagagagtttcagtttcattctttgtgataaactaacaaaaataaaatctccaaagcagaggaaagaaaactaagataacagaaaataacccagaaactcaaccacagaatatgttcctgaggaaatagaaaaatctggaaaagtctaagaaaagattttcaggaacataatggaaggaacagcataaatttaaaaataacccaacagtaacttgtcaaacaaaacggagcatgatgaattagagcagcagatgtaaaaatagtcactgaaacaaaacacactctggaagatggaacccagaacacctcagagatggatgaggagagaaatacctgaagtgataatggcttcattccttccccagaaatgaaaaggcacaccagctataaagcaggataaatgaaacaaagcttcccctacacacattgtgctgagagagaacagatagaatacctgaccagaggtaacattagagagatggcggccttcctctgagcaaaaacacaatgaccagcgctgctacttttcaaagcaacaagatcaagaccaggcgtggtggctcacgcctgtaatcccagcactttgggagctgaggcatgcggatcacctgaggtcaggagttccagaccagctggccaacatggtgaaaccccatctctattaaaaatacataaatgagctacgcatggtggcacgcacctgtgatcccagctacccggaaggatgaggcagaactgcttgaacccaaaaggcggaggttgctgtgagctaagatcacgtcactccactccagccagggcaacagagcaagactccatctcaaaaaaaataaaaattaaaaaggccgggcacggcggctcatgcctgtaattccaacactttgggaagccaaggcgggtggatcacctgaggtcaggagttcaagaccagcctagccaacatggtgaacccttgtctctacaaaaattagccaggcatgatggtgggtgcctgtaatcccacctacttgggaggcgaggtgggaaaatcgcttgaatccgggtggcagaggttgcagtgagccgagatcacgccattgcactccagcctgggcgacagagtaagactccgtctcaaaaaaaaaaaaaaaacccaaacccacacaagatcaacctacctcttgctgcccagcttaaactagatgacaaaagaaagatttccatacaaagactggcagcttcccatctatacctcctggctgcaaaaactactaaaaaaggtacttcaacaacaagaaaataaacgtataagaaacaagcaaaaggaaccatgaggcaaaccaaacattactccccacctcccccttttttttttgagacagggtctggccttgtcgcccgggctggagtgcagtggtgctatcaccactcactgcagcctcgacctcccaggctccatccttctgcctcagcctcctgagtagcagggaccacaggtgtgcgctgctatgactggctaatttctttttttttttggtagagatggggttttactatgttgcccaggtgagtctccaactcctgggctcaagtgatctgtccaccttggcctcccacaggctgagattacaggtgtgagtcactgcatcttgccagtaaatagatatatgtatttttaaaaaggtacaatggccaggtgtggtagctcatgcctgtaatcccagcgctttgggagttcaaggcggggcggatcacctgaggttgggagtttgagaccagcttgaccaacatggagaaaccccatctctactaaaaatataaaattagctgggcgtggtggcgcatgcctgtaatcccagctactcgggaggctgagacaggagagaattgcttgaacccaggaagcaaagtttgcggtgagattgtgccatcgtactccggcctgggcaacaagagcaaaactccgtctcaaaaaaaaaaaaaaaaaagtaaaacgaatcctacaagactatgacactatgacagggaaactagaaaggggccttcagagggtattccaacactagttgtagctatttaaccttgttattttactaaaagatcagataacttccaagtcagcgagggaaaacgggaggacagagcggaagctggcaggaagagtgatgccaagacaagccaacttacaaactgcccctcgtcgatgcctatgacagccacgcccagggcctcctgggccacgtctcggagcaggcaggcgggcagtgcctccatggtgttcctgggaagagaaagccagagcgtgagcagggccagggaggccagaagccacaatgcaggggccagggaatggcactgtcgtgaccacctgctacctgcaaagcaggctcagtgttcacccagccgggctttgagaagttagcacctatgggaaaggccctcgtccagaaaaccagttatttatttattttttatgaaacagagtcttgctctgtcacccaggctggagtgcagtggcgccatctcggctccctgcaatctctacctcccaattctcaagggtctcaagcgattctcccacctcagccacaagagtagctgggactactggcacacaccatcacacccagctaatttttgtatttttagcagacatggggtttcaccatgttggccaggctggtctcagactcctaacttttaagtgatccacccgccttagcctcccagaggaaaaccagttatttatacaagccacttcacttgatgctttggattagaaattagtaatgtccagtacaaagctcaatgagactaaaaactcttccactgttcaggagctgggggcagactaggccaacttcatcaggtaccagggcccatgataccattaggggccagccaaatgtttccttttaaaattcagaagaatgaataactagaactgggcctgggttatatttgtctttatattaattatgttgcaaaacataaatttttaaaatcctgtattctggccagacacagcagctcatgcccgtaatctttggggaggccaagacgggaggatcacttgaactcaggagttcgagaccagcctgggtaacacagcgagacactgtgtgaaaaaaatgtaaaaattaactgggtgtggtggtgtgcgcctgtagtcccacctgctcagggggctgaggtgggacgatcacttgagcccaagggtttggggtcacgtaacagtaagctatgattgagccactgcactccagcctgggtgacagagagagaccctgtcccaaaaacaaacaacaaacaaacaaaaaaacatactttacaactattgtttcgttattaccttgctataatcctacttcgagttctggaaagaatgtgtgaaacagtattttgggcattttaaattccctcttccctccctaaacagagaaagacaaagtgagggcaggtgggaggccagctgtggcccctgcaagggcagcctctcgagccatcaatgctgctggcccagccttggcctctgtggcccgtgttagagatgacttgtgacacacgggcagaactcatatttaatcccggatctgactgactccagaagttgtacttccaacagctggaacgaagtgacctcctctgctttccctgtccccaccaggtgtaacaccaccctgtgccgtggacatcgcatcttaggaatgaggaagcaaatttggaaaagtaaatgacctacatcagacagcatggtcacgaagtgcggttaaattcccacatgcaactccaagccccaagcaccctccactccaccagcatctggcttcaggagcccctcagctcccaccgaaggccacacgccgggtggatctgttctctgcacagccatagcaactctcggatacagctcccagccagggctctgaggctgaagccctataatgtgtggcacagcatggctttgccactgggtgcccaggtggacaagtccagaggaccaagcaaagcgtctcaggctcagaaacatcaggcccacatctgctgccaaggaagtgaatttaactcccaaactgaggttgcaggcggaaatgtccagcgagctcaaacagctacacataaaacagggaagcgtgaaggctgccaggtgacgggggagccagccaacaacggacaactaaaaaattaaacaaaaatcaacgtgcaggccaaaccaaaccagtctgcagcctgtgtgaagctgaaaccctacggcagagtttctgaacactggcaggctcctgacatttggggccagctcgttcttgcatgggggccgtcctctgcaccataggacccttagcagcagtgtccctgatttctacacattaaagcccaaaagcatcccctcccccctccagttgcaacaactagaaatgtcttcaaacattgtcaaatggaccctggcggcaaaatcaccctcagtggagaaccactggctccagcccagggagtggagagtgtgcgctaccttgccaagcaccttggaaagtgtgctgatttgaatcattcaatgttcaaatgattaaccatccccattaaagagagtcctaacagtgtgtcctgtgccttgtgattttccactggacaggactgcagggggcagggactgaccggtcatgtgtgcagaagctgctgctgtagcgagtgtctttggcatacttgatcaccaggcacttgtactgagcaatctggaagcgacggacgcgtctcatcaactctgtgctgcaagaggagagagggtcaggtgaggtccacggcgggaggagtgggagaaggagacccctccccaacaagcctggctcctcattgtccctagtggtatgcagactgagcccaccacagccagaaaagagcagggcagagcaggcagggtataatatccctacaaagagggttggaagtcagaattctctatggggaagaggtccaggaatggtactcaggtggtcccaggaagtgtgggaggagtaaccttctccaagatgtagtggggaaggcagaagcaaaggctacatgtagagggaacctgcgactgcattccaaagtaacctcatcccagagttgttcccagagttcagagtttttctttctttctttttggggtggagtctcgctctgttgcctaggttagagtgcagtggagcgatctcagctcactgcaacccctgccttccgggttcaagagattctcctgcctcaacctcccgagtagctgggattacaggaggctgccaccatgcccagataatttttggttttttttttcagtagagatggggttttaccacgttgaccagggtggtctcaaactcctaacctcaagtgatcaacgcacctcagccttccaaagcgctgggattaaaggcgtgggccaccacacctggcatacagcttttctaaattaatttcagaaagtctttgtgtgcagcgtcaaaagcacttgcttctgggtccaagaagtccaactctgagccacatcttcctgagcaaggggtttgagctgaagtgatccccagggccataaaagaatgttggggcagggcatggtggctaacatctgtaatcccagcactttgggatgctgaagtaggaggattgcttgagaccaggagttcaagaccagcttgggcaacatagcaagaccccagctctataaaaataaaataaaattagctgggtggaggcgggggggtgcacgcctgtagtcccagctacttgggaggctgaggtgagagaattgcttgagcccaggagtttgagaccagcctgggcaacatagcaagatcctacctctagaagaacaaaaacaaaacaaaaagaatggtgcgtgggtagtttactcaagaaactcactagccccacccgggtcagggaatggttctatcacctcaggagagcagaggctccacggcttcagactccttggtttagaaagcgactacgtttccttggccttagaaggaaacagccacattgaataggggtgtacaaaaaggcctggcctacaggggacacaactggttgccaccttctcagaggacttggtggggaagacagctaagctgtaagcagctgtcaccagctccaggagggagtggcgtccacacaggacgaggggcttggcctgggcagaagagggcagagacttcctcctggactgaattcaagggaggagcaccccaggcgggagctgtaggaggctgtgctggtccttctaggggaagggaaggggagggaagggaaggggaggggaggggaggggagggaaggggaggggagggacgggacaaggggtccccggagaagaggaaggagctccaccccagccccgcgaagccattacctttttcctgagaacatcggcccgagaatcacctaggagagaaggtgaggtcatttgagggcccgccctgcgcggatgcctggacacaggctatcaccacgaccacctcatccccagccacgcgcagggctggcccccgcacctggatctgcccccgggtcttgctgggggagccaggcagcacagtgggcaggttaatgcagctcattgcgcctccgggaagttcacgaacccgagtactctccaaggccgtcccgcagtaagcccctggttcccgcgccgaccgctttaaaccacggcgtgctggccaatcacgagccggccccgccgccatggggccaatcagcgcccggccgctgacctggcgggagatttggccgcagcccgccccctcgtgggaggaatccgggacgtgcgcccagggactgggagggcctggaaatcagggcgatggacgtggctgatcggggtggggcctggtctgagccccgcctcggtccgcccaccaagtttaaaggggcggagcgaggcggggctctggccatataaacagagggacgcacgcccatgcggctgtagacgccatgatggatgtgtctggtgtgggtttcccaagcaaggttccttggaagaagatgtctgcagaggtaggtggattgcagggagggactaaggggctggggcggagttagctcatttattagattggaattccaagaaggaagcttagaagccgtctagagcactcctgtgggcatgcagagcgcctagtgcgtgccaggtccccagtgcttgagcaccatggtgtattttaccttctcctaaggatttttgttaacctggttttcaggataaagaaaattgaagtcctgactatgctaataatatccgtagaccctgccaggcgtggcggctcacacctgtaatcctagcacttttggcggatcacgaggtcaggagttcgagaccagcctggccaacatggtgaaaccccgtttctactaaaaatacaaaaattagccgggcgtggtgatgtacctctgtaatcccagctactggggaggctgagacaggagaatcgcttgaacccaggaggtggaggttgcagtgagccgagatcatgccatttgtactccagcctggaaggctgggcgatagaccaagacttagtctcaaaaaaaaaaaaaaaaaaaaaaaaaaaaatccatagacccgcaggaggttaggggacaaagttctggaccttgatctgaggttacacaatgtttttgggtctgtgcttatgtggcacaggctgaaggattcagaacagctggtatttacattggggttgtgaaggttagaaacatacaggccgggtgcggtggctcaaaaaaaaaaagaaagaaagaaaagaaacccattgtataatcatgatcataaataatagcaacaaagatggtggtagtgatcacagagtgtgccaggtgtggctgtaaggatcctacaggtaataacctttccaggtacagattggacagatccaaggacctctgacaaagagctccttcactgggaggaagaagcaacccacactgactggcttgctttattttactcgcatgctttatctcttttaaccttgtgatttggatacatgccttctttttttgagacacagtctcgctcagtcacccaggctggagtgcagtggcatgatctcggctcactgcaacctctacctcccgggttcaagtgattctcctgcctcagcctcccgagtggctgggattacaggcacactgtagctggtactacatgcctggctaattttttttttttttcttttgagacagagtctcgctctatcgcccaggctggagtgcagtggcgcgatctgggctcactgcaacctcttcttccagggttcacgccattctccggcctcagcctcctgagtagctgggactacatgcgcccgcaaccatgcccggctaatttttttgtatttttagtagagatggggtttcactgtgttagccaggatggtctccaactcctgacctcatgatccgccccccttggcctcccaaagtgctgggtttacaggcatgagccactgcgcctggccaatttttgtatttttaatagagatggggtttcgccatgttggacagactggtcttgaactcctggcctcaagtgatccacccgcctcggcctcccaaagtgctgagattacaggtgtgagccactgtgccgggcctggatagataccttctaccagtcaggaaactgaatctcagagactaagtaacttgttgaggataaaacagtaagtaagtgagggaggtcagatggcatttgacctcaggccttgccatgaggctgccctgacttcccatttctcatgatggttttgagccctttcttcaaaatctggttccttgttacttttttttttttttttttttgagatggagtctcgctgttgtcacccaggctagagtgcaatggtgggatctcagctcgctgcaacctccacctcccgagttccagcgattctcctgcctcagcctcccgagtagctgagattacgggcgcccgccaccatgcccagctaatttttgtatttttagtagagacggagtttcaccatgttggccaggatggtctcgaactcctgacctcaggtgattcacccgcctcagcctcccaaagtgctgggattacaggtgtgagccaccacgcccagtgttttgtttttttttttttgaaacagggttttgctctctcaggctggagtgcaatggcgcaatcttggctcactacaatctctgcttcctgggctcaagcgattctcctgccttagcctcccgaatagctaggactacaggtgtccaccaccatgcccggttgatttttcatatttttcgtagagatagtgtttcgccatattgcccagactggtctggaactcctggactcaagtgatctgcctatcttggcctcccaaagtgctgggattacaggcgagagccaccgtgtccagcattttctgttggtttttttttttttttttttgagatggggtctcactctgtcgcccaggctggagtgcagtagcatgatcccggctcactgcaacctctgcctccctggttcaagctattctcctgcttcagcctcctgagtagctgggattacaggcgcgcgtcaccatgcctggttaatttttgtatttttagtagaaatggggtttcatcatgttggtcaggctgatcttgaactcctgacctcgtgatcccgcctccgcctcccaaagtgctgggattacaggcgtgagccaccgcgcccagcctctgtttttttttttctttttttaattctccaaactgcctcagaatggttccttgttactttctgcataaagtgtgaaggtgttagcccgacattcaccgcccctcctcctccagcccagcctcccagcctcacctctgtgtgtcagccatagggcctgccagcatttgcaaactgacctttcattccttcctcctcacctctgtgcctttgactgtgcagtgacctcctgtggtcagaatcgcaccctctcagcgcagatcagctcctccttttttaatttttttgaggtagagtcttgctctgtcgctaggctggagtgcagtggtgcgatctcggctcactgcaacctccacctcccaggcttaagcaattctcctgcctcagcctcccaagtagctgggattacaggtgcacaccaccacgctcggctagtttttgttttcagtagagatggggttttgccatgttggccaggctggtctcaaacttctgacttcaagtgatccacctgcctcaggctcccaaagtgctaggattacaggcgtgagccaccgggccacctggcctcccctggtcgtaactgctgtgggagtggtgcccatgatggcattaactgaattcgtttgggggacctcatctccccttaaggctgccagctggctaaaggcacagcggtcgctggtatacctctagaccatggatctgagggcatcttggagaccctgggatactggggcgagggcttctaaggcagagaggagcagccgggcatgggcgagggggaggggcacactctgttgagaaggaaagtcttacggagcctcatgtttgtgccctgcaggagctggagaatcagtactgtcccagccgatgggttgtccgactgggagcagaggaagccttgaggacctactcacagataggaattgaaggtactagtgtgacctctccgtggccgcattgggtgtccttaagcatgtggcagtgattcagaatgctgggggttgggggggctgtgctgcaccacctgggcctcgaggggcatttcccaaacaccaggcactttataaacctccctgctcaggggcaggtgcccaggaccccttgctgcagggactactggaggcaggagaggtccgggggaggtccacggctcagtcgaccatgcctggcctttcttgctcagccatccatacccaggcccgtaaggctgcgggctgtggttggcatagggaggtgaagtgaacagaggaacgttccccatccgctgctgaatgtggaatgcggtcactattcctaaaaagcaatactttgggaggccgaggcaggtatatcacttgaggccaggagttcaagaccagcctggccaacatggcaaaaccctatctctacaaaaaaatacaaaaattagctggacacctgtaattccagctactcgggaacctgaggcatgagaattgcttcaacctgggaggcagaggttgcagtgagctgagattacatcattgcatgccagcctgggtaacagtgagaccctgtctcaaaaaaaaaaaaaagcaatgaagcctcttttttttttgagactgagtcttgctctgttgcccaggctggagtgcagtggcgcgatctcagctcactgcaacctctgcttcccgggttcaagcgattctcctgactcagcttcctgagtagctgggactataggcgcacctctccacacccagctgatttttgtatttttagtagagatggggccaccatgttggccaggatggtctccatctcttgacctcgtgatctggctgcctcggcctcccaaagtgctgggattacaggcatgagccatcgtgcctggccgccttttctttctttcttttttttgtttttgagacagagtttcgctcttgttgcccaggctggagtgcaatggcatgatctcgactcaccgctaacttcgcctcctgagttcaagtgcttctcctgcctcagcttcctgagtagctgggattacaggcatgcgccaccacgccctgctaagtgttttgtatttttttttttttttagtagagatatggtttctccatgttggtcaggctggtcttgaactcctgacctcaggtgattcgccctcctcggcctcccaaagtgctaggattacaggtgtgagccaccatggctggactttttttttttttttttttttgagacggagttttgctcttgctgcccaggctggagtgcaaaggtgcaatctcggctcactgcaacctccacctcccaggttcaagcgattcttctgcctcagcctcctgagtagctgggattacaggcctgtgccaccaagcccagctaattttgtatttttagtagagatggggtttctccatgttggttaggctggtctcaaactcccgacctcaggtcatccacctgcctcggcctcccaaagtgctgggattacaggtatgagccaccgtgcctggactttcaccttttctttctttaaagaaatctggacttgggaacctgtaaactagtgaagtcttaaggtccatttccatctctaccctgtatctgcaaagtgctgtaccacgatctgaacacctggtaatgcatccgtgctgggatggggagcaggccccgaggaggaagtgtaggtgaggacgcagccaaccatgcttggcaaattagctctgttgcagcaggctcaacacagcctttcagaggcagatgcctgggctcctgggcttggtggttttctaagcggagagaacccaggaggaggaacagacttgttagaagtgtattccagcaattccaccatcctcctgtctcaatagattgggggggagctgtttcctgggctcttcatgttccttgctgtgctcagctctgatccaaattcatctctatttgctcgataaatacatgagtgtggtgaaacatacaagagctgtaagcagccaggcgtggtggctcatgcctgtaatcccagcactttgggaggccgaggcgggcggatcatgaggtcaggagatcgagaccatcctggctaacacggtgaaaccccatctctactaaaaatataaaaaattagccaggcatggtggcgggcgcctctagtcccagctactcaggaggctgaggcaggagaatggtgtgaacctgggaggtggagcttgcagtgagccgggatcgcgccactgcactccagcctgggcgacagagcgagactctgtctcaaaaaaaaaaaaaaaaaaaaaaaaaaaagctgtaagcaaacctatttgcctgtcttaattgtcttgagtgataaaaagagctgaccctattgagaaagaatgtcagatgtaaaaagcacgcactattgaaacttcaagtcatatgaatgaaagaaaattaaaaggaaaggattaaaaaggaaaaaaaaaaaagaggccaggaactgtcacacacgcctgtaatcccagtactgtgggaggtcaaagcacgaggatcctttgaggccaggagtttgagaccagcctgggcaacatagcaataacctgcctctacaaaaaatttaaaggccaggcgtggcagctcacgcatgtaatcccagcactttgcggggctgaggtgggcagatcacaaggtcaggagattgagaccatcctggctaacacggtgaaaccctgtctctactaaaaatacaaaaaattagctgggcgtggtgcgggcacctgtagtcccatctactctggagactgaggcaggagaatggcttgaacccagaaggtggagcttgcagtgagctgagatcatgccactgcactccagcctgggcgacagagcgagactccatctcaaaaaaaaaaaaaaaaatttaaaaattagcagggtgccgtagtgtgcacctgcagttccacctacttgagaggctgaagtgggaggattactgctgccttggagttcaaggctgcatatttctttatgtattgggttttttttttttttctttgagacaaggcctcgctttgtcacccaggctggagtgcagtggcgtgattttggctcattgcaacctctgcctcctgggttcaagccattcttgtgtctcacattcttgtgtttcagcctcccgagtagctggaatttacaggcgcgtgccaccacgccagctaattttgtatttttagtagaggcggggtttcaccatgttcgccaggttggtctgggactcctggcctcgagtgatctgctcgcctcccaaagtgctgggattataggcgtgagccacactttgccttctttgcaccagggagaattatattttttctcattttttatttgtattcgtccttacaatgccagcctgttaacttgcaatgagggatgttcgcttttaatgagtagacagcctcatccccatcaaggcctggccgccctcatctgggctcagggagaacaaagtctaactgctgtgtgagtatggtcagggcgcaggaggctggcagagagggggtttaagaaccatttcctttaccactagcttttaaattagttttactgtgaccttcagtaaaaatacttttttttttttaagacggagttttgctcttgttgtccaggcttggagtgcaatggcgcaatctcggctcaccgcaacctccgcctcccaggttcaagcgattctcctgcctcagcctcctgagtatctgggattacaggcatgtgccaccacgcctggctgattttttatttttagtagagacggggtttctccatgttggtcaggctggtctcaaactcccgacctcaggtgatccacctgcctcagcctaccaaagtgctgggattacaggcgtgagccaccgtacccggcccaaaaaaatacattttacagtcagcaaaatgctgtatatattttttatccagatacaaaagttcaaattctgtatgatttcatttaaatgaggtccctagagaagtcaaattaataaagacaagaaatggaatggtggttggtaggggcaaggggagggaggaatggggagtgagtgtttaaaggggacagtttctttctttttttttttcttttgagacagggagagtctcactctgttgcccaggctggagggcagtggtgctatgtcatctcactgcaacctccacctcctgggttcaagcagttcttgtgcctcagctgcccgaatagctgggattgcagatgtgcaccaccacgcccggctaatttttgtgtttttagtagagacagggtttcgccatgttggccaggctggtctcaaactcctggcctcaggtgatccgcctgcctcgacctcccaaagtgctgggactacaggcatgagttgccgcgtgcagccctgcagtcctgttttttttttttttggggcggagtttcactcttgttacccaggctggagtgcaatggcgcgatctcagctcaccgcaacctctgcctcctgggttcaagcagttctcctgccttggcctcccaagtagctgggattacaggcgtgcgccaccacgtccagctaattttgtatttttagtagagatggggtttctccatgttggtcaggctggtctggaactcccgacctcaggtcatctgcccgcctcccaaagtgctgggattacaggcaagagccaccacgcccggccttgcagtcctgtttttaataccatgcacagcattataaattattattattattattatttttgtttttgagacggagtcttgctctgtcacccaggctggagtgcagtggcaagatcttggctcactgcaagctccgcctcccaggttcacgccattctcctgcctcagccacccaagtagctggtactacaggcgcccaccaccatgcccagctaattttttgaatagagacggggtttcaccgtgttagccaggatggtagcattagaaattatttctaacccaggctgggctccatggctcatccctgtaatcccagcactttgggaggccaaggcggtgggaatcacttgaggtcaagagttcacggccagcctggccaacatagtgaaaccccatctctactaaaaacacaaaaagtagccaggcatggtggcgtgcgcctataatctcagctacttgagaggccaaggcaagagaattgcttgaactcaggaggcagaggttgcaatgagcaaagattgcaccactgcactctagcctgggtgacaaagcgagaccttgtctcagaaaaaaaagaaaagaaattatttctacccagccaggcacagaggctcacgcctgtaatcccagcactttgggaggccagaggggggcagatcacttgaggtcaggagttggagaccagcctggccaacacgacaaaacaccttctctactgaaaatacaaaaatgagccaggcatagtggcacatgcctgtaatcccagccaccggggaggctgaagtgggagaatagcttgaacccaggttggggaggttgcagtgagtcgagaccacgccattgcactccagcctgggcaacaaagaatgaaactccatctgaaaaaaaaaacccagaaattatttctaacccaaaacaattgaaaacaggtactcaaacaagcatttttacacgcgtgttcgtagcaccatttccacatagcctgagttgtaaataatagcaatgaagcttttgctttaatgagaaaggaagtttgccataaggtttgttctggggtgtcttgctgaagccctcctgtgttcttgccctggggttcagggactggagggccctctgtggggggcatgagtcacttcattctctgtctctgcaccccagctgtcctctcctagagagaggcaatttctctttcccgaggttagtagagttttttaatatctgagagaggcttatgcatgataatgaacacctatagctgcttggttttaatggccattccacttagaacataaattccatgatgtttttcttaatcgtagcacaactttaatctagtccatttataggcttgagaactcctgtgtgaattaaatcacgaccttctgatgaagccactccgatgagcctgtgaggcacattgtcttcacactgtgctggggcagggttgttggcaaacccccatggatggcagccggcaatggcctcacagtgacaaatgcgtctgccttttgacccagaattctacccctgagagtgcgtcctacagatgcttgcaagtggtatggtaatggatgtacaaagctattcacagcaggggtgtttgtggtagcatggcctgggagacagcccagatggctttcagcaaaggattggtggcaggtctgcagccctggggcttatcagacaccaaccctgctggcaccttgatcttggacttccagtttgcagaactgtgagaaaataaaatttccattaagtttccccagtctggtattttgttatagccgcccaggctgactcagacaggagcccaggatggatgtgagcgtgttataaccagctcacgcttgtggctgtagggagtccgggtagaagctggaagagcctagaggggtggctgctgccttccagggaacaggtcaaagggtatccaaccagagtggtctcagtgcagatggggaggagactctagacccaggacaagcagtggagggggcatccaaggatttcctgatgatcagatgtggtttgagaaagagagggggccggtggcgcatgcctgtaatcccagactttgggaaaccaaagcaggaggacgcttgagcccaggagttcgaaaccagctggcaacatgcaagacctggtctctacaaaaaaattaaaaattagctgggtgtggtggtgcttgggaggctaaggtgggaggatcacttgagccctggagttcgagaacagcctgggcaacatggcgaaaccctgtccctacaaaaaatacaaaagttagccaggcgtggtggcacacgcctatagtcttagctactctggtggcagaggtgggaagcttgtttgaacctaggaggttaaggctgcagtaagccgagattgcaccactacactccagcctgtgtgacagagtgaaaccgtgtctcaaaaataaaaagtgaattcaggagttccagaccagcctggccaacaccgtgaaaacccatctttactaaaaatacaaaaattcgcctgggccagatgcactggctcgcacctgtaatcccagcactttgggaggccaaggcggggatatcactcaaggtcaggagttcgagaccaacctggccaatatggtgaaaccccatctctactacaaatacaaaaaaaaaaaaaattagccatgcatggtggtgcgtgcctgtaatcccagttacttgggaggctgcggcaggagaatcgcttgaacccaggaagcagaggttgcagatcacttgaacccaggaaacagaggttggagtgagcggagattgcgccgttgcactccagcctgggtgacaagagcaaagctctgtctcaaaaaaaaaaaaaaaaaaaattagacaggtgtggtggcgcacacctgtaatcccagctgctcagaaggaggagacaggagaatcacttgaaccccagaggcggaggttgcagtgagccaagattgcaccagtgggctccagcttgggcgacagagcgagcctctgtctcaaaaaaacaaaacaaaacaaaacaaaaccaaaaccacacaaggcttttcagtgaaatgctcactcctcttccctttcgtgtgcccagttcccctggcccccgtcaaggtggccactgttcttcatatggatatagactccccctccctttcatccaaatggccccgtagtacacacagttccaccctgccagtttcacttagtatttcttggagatgtttcctcatctgtacgtagatagcttctcgtcagtacgtcagtacgcagggagccctgcaggggcaagtggttggtaacgtgggtgctggcaaaacaggttttgcaacctcactggcgttctgcaaaggcagcttcctgcctggattggcccatgggcaacttccctttgatttccctcagctttaatccatccagctgaagtggagacagcccggtttatggttctgcattctggcatagacgcaattcgtacaagctctcagccccatgctttttcttcctctgccgtgtttacccttctggagttgcagaatgaatcacccacccgagggaagcacggttgtttttttttttcttttctttttttttgagacagtcttgctctattgcccaggctggagtgcagtggtgcaatctcggctcgctgcaacctctgcttcctggttcaagcaattctccttcctcagcctcctgagtagctgggagtacaggtgtgcgccaccacgcctggctaatttttgtatttttagtagagatggggtttcaccatattggccagggtggtctcgaatgcctgaccttgtggtccacccgcctcggcctcccaaagtgctgggattgcaggtgtgcgccgccgcgcccggccaggcttttttttctctaggcctgctgtggccaccaaggctggggaccagggggcctccagggacagggatcccaagttgcacgttaatacacggagccctttctgagatgcaggttctacagggaactggattccacctcttttggggagatcaacccagcagcccaaggatcccctgatggtgcctgagcacagctgtgagaagggggtatctggatccttggggtgacaggatgggagaggtggagcatgggcctgcaggctggcccccagaggccttaggtctctgctgactagctagaattctgaaaactgtgttatgtaagacgtttagcatctgcagtgccaaataaaggtgacccccacaacgacataaaaaaaaaaaaagatatgtccaaatcctaaccctgggaacctatgaaaatcctaaccctgggaacctatgaaggtatttccttatttggtgtgttttgttttggtttggtttggtttggtttgtttgatacagagtcttgctctgtcgcccaggctggagtgcagtggtgtgatctcagctcactgcaacctctgcctccgggttcaagcgattgtcctgcctcagcctcccaagtagctgggattacaggcacgcgccaccacgcccagataatttttgtatttttagtagagacagggttttaccatgttggccgggatggtctcaactcctgacctcaagtgatctgcccgcctcagcctccctgtaaccagctgggattgcaggttcccggttggtatttccttatttggaaagaccatctttgtaggtgttattagctaaagtcaagtcattctgggttagggtgggccctaaatgccattgactgctatcctgctaagagacagaagagggagggacacacagggaggggaccacgtgaagacggaggcagagacgggaagaggcagaggtgactggagtgacgtagccccaggccttggaacgcctggagccaccaggagctgcaggaggcaaaagaggcattggcagagtgtggcagtgtccacaccttaatttcagacttctggcctttagaactgtgagagaatcacgttctactgctgtgagacactcaatttgcagtactttgttacagctgccctggtaaacaaatgcaatatttattttcagcaaagcagggagttcctgcaaagatgactagaccaggttccttctcccaagagcgcagtgtcctagctgtgaatactaggagtgcgttgctgcggtgggaggggaggcagggtttactgactgatcattcccagtggtctggatgctctctttctttctttcctttctttcgagacagaatctcgctctgtcacccaagctggagtgcagtggtgcaatctcagctcactgcagcttctgcctcccaggttcaagtaatcctcccacttcagcctcccgagtagccggaattataggtgtccaccaccacgtccagataactttttttttaatttttagaaaatataggctaaggcacgagaattgctggaacccaggaggcagaagttgcagtgagccaagatggcaccactgcactccagcctgggtgacagagcaagactccgtcgcaaaaaaaaaaaaacgatgaatgctaggataaaaaataaagcaagaggccaggcacagtggctcatgcctgtaatcccagcactttgggaggccgaggtggatggatcatctgaggttgagctcgagaccagcctcgccaatacagtgaaaccccgtctctactaaaaatacaaaaattagccaggtgtggtggcacgggcccataatcccagctactcaggaggctgaggctggaggattgcttggcgccgggagtttgagactgtagtatgctttgattgcacctgtgaatagccactgtactccagcctgggcaatatagtgagaccctgtcctttaaaacaaaaaagtatagcgcacataataagtgtgtagtaaagtcgtgctgaaaagggtcctcgcagaaccacagttcacttgttgacagacgtcaggactggcagtcttttttttttgagttggcgtctcgctctgtcccccaggctagagtgcagtggcgtgatctcagctcactgcaagctccacctcccggattcacgccattctcctgcctcagcctcctgagtagctgggactacaggcacctgccaccacgcctggctaattttttgtatttttagtagagacagggtttcaccatgttagccagggtggtctcgatctcctgacctcgtgatccacccgcctcggcctcccagagtgctgggattataggcgtgagccactgcacccagcctggcagtcctctttcgatgggaggtgctcagagctgaagctcaacacgccaacttaagggagctttcagctggaatgtttctacctgagctgaaatagaaattgccgccacctggctgggcacagtggctcatgcctgtaatcccagcactttgggaggccaaggtgggtggatcacgaggtcaggagttcaagaccagcctggccaacaaccctgtctctactaaaaaatatatatatatatataaaaattagctgggcatagtggcgtgcacctgtagtcccagctacttgggaggctgaggcaggagaatcgcttgaaccggggaggtggagattgcagtgagccgagatcgcgccactgcactccagcttgggcaacagagtgagacttcgtctcaaaaaaaagaaaagaaaaatttctaccacctgagcttgtgctgacagcgacttgtccatttctgagacagccaccacaagggcccgggccaccaggaagagcctgctgcatgtcccctatggagacggcgaaggggagaaagtggacatttacttccccgacgagtcgtctgaaggttgtcggtgaaggggctgggggtcccggggcttgggggtccagtggcagagctcagcagggcgggccttgctcacacgccctgtgcttggttttgcagccttgcctttcttcctgttctttcacggaggatactggcagagcggaaggtgagtcgggggatgtggatggtggactgcaagagagattccactttccctgggggactcctcctccagggctgccgcaaccaaactgccacaagctgggcactccttgcagggctgtgtctcacagcgctggagaacggaagtctcaagtcaaatgtgggcagggttcctagggagggtccttcctgccttctccagcttctggtggccttagacagcccttagcttgtgtctgcatagctccagcctctgcctccattcacatgtgatcctggtgttcctgggtctcaaatcttcctctctctttttttttttttttttttttttttgagacagagtctcactctaacccagactggaacgcagtggtgcgacctcagctcactgcaacttctgcctcccgggctcaagcaattcttctgcctcagcctcccaagtagctgggattacaggtgcacgccaccacacccagctaatttttgtatttttagtagagacagggttttaccatgttggccaggctggtcttgaactcctgagctcaagtgatcctcctgccttgacctctcaaagttctgggattacaggcgtgagccaccacaccagcctccttttttttttttttttttttataaggtcatagtcacaggttctggggttaggatttggacatatcttttggggggacacagttcaacccactacacccagtgagaagcatgttcagcctcctcttgaatcaagggaaaagccagagtgaccaaccactgtcccagtttgcttgggactgaggaggggtttcccaggacatggggttttcagtactttaggaaaaaaaaatgagagtcccaggtaaaatgggacagttggtcactgtaagctaagcagtgggtatttgggaatttgggatcttggcagacactgctgttccctagggtcttcctacagagttgccttcaagcatgttcatgttaatagcttacatttaatggccaggtacggtggctcacgcctgtaatcccaacactttggaagggcaaggcggacggatcacttgaggtcaggagttcgagaccagcctggccaacgtggtgaaaccctgtctctactaaaaatacaaaaattagctggacgtggtggtgtgtgcctgtaatcccagctactcgggaggctaatgcaggagaatcacttgaacccaggaggcggaggttgcagtgagctaagatcatgccactgcactccacccagggtgacagagcgagactctgtctcaaaaaaaaaaaaaaaaaaagcttacatttattgcacacaaaactctctacactgctagtctttaattctcaaaaacagttccctgagagagggaacataattgcctctattttacagatgacaaaaccaggcttagaagttacacaaattgccttgcacagtggctcacacctataatcccacacattgggaggctgaggcaggaggattgagttagaaaccagcctggtcaacatagcaagacccccatctctacaaaagaaaagataaatttgctgggcatagtggtgcacacctatactcctgcttgggaggctgaggcaggaggatcgcttgagcccaggaggtcgaggctacagtgatccatgatcgcaccattgcactccagcctgggcgacagagcgaggccctatcgcttagaaaacaaaaagttacatgaagttcccccaaggtcccgtagctagcatgtgatgtggcagggagagagcctgtccgcttcactctctcacatgggaccagaaaggggtgatgctgtgcgtggacaggacatctggcaagtggtgtgtccaggacacaggaagcagcgtagtggccaagctgcctccagctgtcacatctgtgtgtctctgcagtaaggatgagtctgccttcatggtccacccgctgacggcacagggagtggccgtggtaatagtggcttacggcatcgcccccaaaggtaataggagtggttgctgcaggtccgagggccggtgggctttaggaggaagtgcatccctgacccagctcatgctctctgtgcaggcaccctggaccacatggtagaccaggtgacccgcagcgttgcgtttgtccagaagcggtatccaagcaacaagtgggtgttgccagtagattttcttcctgttggacctcagtgggtgggaggacagtgcaatcagtacctaggatacagccaagctgcccctctggcctgtggagcagaaagcaaattgggactcttcgaagggggcctgatgttgtggggaaactgcgtgcaaatccagctctctgctctgacccctcccaggggaatttacctgtgtggacactcagccggggcccacctggctgccatgatgctcctggccgactggaccaagcatggggtcacgcccaacctcagaggtttccatgggagctacagcctggctgggcaaccttcatctccccatgagccttggggtttgggccaactgcttgaaatcctcccggccatgagtggcttgaccgcagggcttcgagccctctgagcaaggccttctctgcctcctctgtgccccttcccctggtcctgcccctctggcggtgggggtgggctggccctgccttgctccgcctggagcctggccctgtgacaattctgtaccttcacaggctttttcctggtgagtggggtctttgacctggagcccatcgtgtatacttcacagaacgttgctctccagctgaccctgtgagttacttggccaccacctcccctggctcaccaggagcctggctcctctctgtcctgacccctgtccactccccaccccagggaggacgctcagaggaatagcccccagctgaaggtggcccaggcacagccggtggaccccacctgccgtgtgctggtggtcgtgggccagttcgactcccccgaattccaccgacagtcctgggagttttaccaggtactcccagtgcaggtttgtggccagaggtcgagggtcatgtgggctcattattttcctctttcttttacccaagtggacaagaccctccatcatttatttaacacgtactgagtgaaccctgacctgtgccaggcatggccccatgtcctgccccacctcccctcccactgctcaggcccctcttcccatgtctcccctgcccagaccctgtgtcaaggagagtggaaagcctcatttgaagagctccacgatgtggaccactttgaaattgttgagaatctgacccagaaggacaacgtgctcacccaggtggggcctcatccctggcagccctttcatggtagacagcacaggtcctgtcgcagccccttagatgtgcaaaccaggagttcaagaccagcctggccaacatggagaaactccgtgtctactaaaaatacaaaacaaattagccagatgtgatggtacgtgcctgtaatcccagctactcaggaggctgaggcatgagaattgctttaacccaggaggcagagattgcagtgagccaagattgcaccactgcactccggcctgagcgacagagtaagactctgtctcaaaaaaaaaaaaaaaaaaaaaagacctgagaacctaggaaagaaagaacctaagaaagaccatcttgtttctttctttttttttttctttagagacagggtctcctctcttgcacccaggctggagtatagtggcaaaatcttagctctctgctgcctcctgggctcaagtggttatcctgccccagcctctcgagtagctgggactacaaaggcgtgccactgtgccctgctaattattcaatgttttgtagagatggggtctctctatgttccccaggctggtcgtcgtcgtcttccttcttcttcttcctccttcctccttcatcttctttcttctcctcctccccctacccccccttcttcttcttcttccttcatctcagcatattatacctctaaccagactgtcttcaactcctgagttcaagtgatcttcccacctcagcctcccgaagggttggggttgcagacgtgagccactgcatccagccctgtctcatttccttaatcaaattcctgcaaagagctgctctgattctggggcttttgtgtcttctcttcctgttccagattatcttgaaaacaatcttccagtagttctgacgatacttggagcctggtccacgtgcatcccaccttgggaagcctctccaaagagctttcggagctgacactgacagcttcagtttcccccagcacccaggagagccttgctgtgtctgtctgcccggcaagagtccattctcactgctgggacactcatgaaaatctccacgtcctccctcttcccagcctggatggagctccagggctggggaacgtccgcaagtcaatgctcagagatgcccggagctgcctcttagactcgtctggcccatctacctgctgacagagcatgacaaagatgacgctcaaaagtaatgccattacttcttttttttttttttttttttttttttttgagatggagtcttactctgtcacccaggctggagtgcagtggcgtgatcttggctcactgcaacctccacctcccgggttcaagcaattctcctgcctcagcctcctgagcagctgggactacaggcgcctgccatcatgcctggctaatttttgtatttttagtagagacggggtttcaacatattggccaggctggtctcaaactcctaaccttgtgattcgcccgccttggcctcccaaagtgctgggattccaggcgtgagccactgcgcccggccagaatggcattatatttaaatagttcataaagaagcacaaaagaatattatttcataacatgtaaaaattatataaaacgtaaatttccatgttgataaataaagttgtattggaacacggccctgctcgttcatttacgtattgtctagggcagctttcaagctgcagggtggagctgagtggtggtgacagtgacctcctggcccgtagtgcctgaagcatttcctatctggcccttttcaggaaaagtttgcggacccctgggtaagggcttccccaagccagctaccctctgccttctgcttcagtctcctgtctgctctgtcctccatctccctgacatttgggtctgtccctgaatgccccggggtctcagcgttggggccaacaccttgaccttgacaggacaatgctacccacatgtaggacaagcttcctctgcacccgagagtggtgtgcatgtcccaagaagccagctatatccatccaccacccaccccaccacaccgcctctttctctcacaccgaatagcattcaagaatttccactgtgggctgggcgcaggggctagtgcctgtaatcccagcactttaggaggccgaggtgggcgaatcacctgaggtcaggagttcaagaccagcctggccaacatggcaaaaccctgtctctactaaaaatacaaaaattagccaggcgtggtggctggcgcctgtaatcctagatacgtgggaggctgagttaggagaatctcttgaatccgggaggcagaggttgcagtgagctgagattgtgcccctgcactccagcctgggtgacaaagccagactccatctcaaagaaaaaaaaaaaaattccactgtatgtgtgcagcaaaccatcatgacacacatttacctgtgtaacaaacctgcacatcctacacatataccctggaacttaaagtaaaagttgggggggggggtaaaaaagaatttccaccgtgacattattgagtatagcaaaaaaaaaaaaaacaagaaacagcctagtgttcattagggaataaacgcattcaagcagcatcaaaccctgcagccattacaaagagatctatgttgaccatgtggaatatctccaagagccacagtagcctcccttatctgtaggattcactccaagaccctctgaaaccatggataatactgaaccctatatacactatgttttttcttgtatatacatacctacgataaagtttaatttataaattggcaaagggtatataaatattccttctaagagattaacaataactaataaagtagaacgattaaaacaatatactgtgatcaaagttatgtgaagccaggtgctgtggctcatgcctgtaatcccagcactttgggaggctgagacaggtggatcacctgaggtcaggagttggagaccagcctggccaacatgacaaaaccccgtctctactaaagataaaaaaaattagccgggcatggtgacacatgcctgtaatcccagctacttgggaggctgaggcaggagaatcgcttgaacctgggaggcggaggttgcagtgagctaagatcacaccattgcactccagcctgggcaacaagagtgaaactctgtctcaaaacaaaacaaaacaaaacaaacttatggggttgctctctttctctcaaaatatcctttttttggcagggcacggtggctcatgcctgtaatcccagcactttgagaggctgaggtgggtgaatcacctgaggtcaggagttcaagaccagcctggccaacatggtgaaaccccgtctctattaaaaatacaaaaaattagctgggcgtggtggtgcaggcctgtaatcccagctacttgggaggctgaggcaggagaatcactcgaacccaggagctggagtttgcagtgagccgagatcatgccattgcactccagcctgggccacagagcaagactccatctcaaaaaaaaaaaaaagaaaaaaagaaagtcttttttttttttgagactgtatctcactctttctcccaggctggagtgcagtggcccaatcatggctcactgcagcctcgacctcccaggatcaagtgatccttccacctcagcctcccgagtagctggaagtataggtgcacgcccgactgatttttttttttttttttagacggagtctcactcttgttgctctggctggagtgcaatggcaggatctcggctcactgcaacctctgcctcttagattcaagcgattctcgtgcctcagcctcccgagtagctgggattacaggtgcccaccaccatgcccggataattttttgtatttttaatagagacagggtttcaccatattggtcaggctggtctcaaactcctgacctcaggtgatccacctgcctcagcctcccaaactgctgggattacaggcgtgagccaccgggcatggcctttcctggctaattttttaaatttttgatagagatggggtctcagtgttgcccaggctgatcttgaactcctagattcaagtgatcctccctccttggtctcccaaagtgctgagattacaggcgtgagccaccgccccgggctggaaaatacttttttaaacgagggcaatgtgaatctgaaatgccatttgaggaaagatctgttcgcctgacatcctgtttgagcctgggtggacaggacagcacctgccagcatcgggaagcactgcagatgggaagaggcttggtcactctccaaaggtggcaggagttggagggggtgagctgaaggtaaggagaaaggaggtggggacccaggagacaggggctgcgcagcgggctcggggctgacacccccacggatacagttcactggggctcaaacataaaaggaacccaactattgtgggaggaaaagactcttctgcctttctgccttttctttttttctttttctttctttctttttttttttttttttttgagacagagtcttgctctatcgcccaggctggagtgcagtggcgtgatctcggctcactgcaagctctgcctcccgggatcacgccattctcctgcctcaacctcccgagcagctgggactacaggcgcctgccaccacacccggctatttttttgtattttttagtagagatggggtttcaccgtgttagccaggacggtctcgatctcctgaccttgtgatccgcccgcctcggcctcccaaagtgctgggattacaggcgtgagccaccgcgcctggctcttttttctttcttttttttttttccgagacagagtttcactcttgttgcccaggctggagtgcagtggcgcaatcttggctcactgcaacctccacctccagggttcaagcgattctcctgcctcagcctcctgagtagctgggactgcaggcgcgcaccaccacgcctggctaatttttgtatttttagtagagacagggtttcaccatattggccaggctggtctcgaactcctgaccttgtgatctgcccacctcagcctcccaaagtcctgggattacaggcgtgagccaccgtgcccagcctgacccctctgccctttcaaaaactatgttcgttctctcacagccttctcttgtcatattaagtccacaccgcaggcctaatttgtccagtgaatgctatgcaaatatttcatgcacctgctgatcgcaggaatgatatgtacttggtacgcactgatcgtacctcggggtgggagaagagagggcaaggaagcaaagaatagccccctcctttcctggtgcaccttcagatgtgccgatggggcccaggctcgctgcagatggcccccttcccagagacaggggaggatcctccacccactccccagcctccaggaccatcctgactcctgccttcaggcactcaagttatgcgtctagacatgcggatatattcaagctgggcacagcacagcagccccaccccaggcagcttgaaatcagagctggggtccaaagggaccacaccccgagggactgtgtgggggtcggggcacacaggccactgcttccccccgtctttctcagccattcctgaagtcagcctcactctgcttctcagggatttcaaatgtgcagagactctggcacttttgtagaagccccttctggtcctaacttacacctggatgctgtggggctgcagctgctgctcgggctcgggaggatgctgggggcccggtgcccatgagcttttgaagctcctggaactcggttttgagggtgttcaggtccaggtggacacctgggctgtccttgtccatgcatttgatgacattgtgtgcagaagtgaaaaggagttaggccgggcatgctggcttatgcctgtaatcccagcactttgggaggctgaggcgggtggatcacgaggtcaggagttcaataccagcctggccaagatggtgaaaccccgtctctactaaaaatacaaaaaaattagccgggcatggtggcgggcgcatgtaatcccagctactgggggggctgaggcagagaattgctggaacccaggagatggaggttgcagtgagccaagattgtgccactgcactgcactccagcctggcgacagagcaagactctgtctcaaaaaaaaaaaaaaaaagtgaaaaggagttgttcctttcctccctcctgagggcaggcaactgctgcggttgccagtggaggtggtgcgtccttggtctgtgcctgggggccaccccagcagaggccatggtggtgccagggcccggttagcgagccaatcagcaggacccaggggcgacctgccaaagtcaactggatttgataactgcagcgaagttaagtttcctgattttgatgattgtgttgtggttgtgtaagagaatgaagtatttcggggtagtatggtaatgccttcaacttacaaacggttcaggtaaaccacccatatacatacatatacatgcatgtgatatatacacatacagggatgtgtgtgtgttcacatatatgaggggagagagactaggggagagaaagtaggttggggagagggagagagaaaggaaaacaggagacagagagagagcggggagtagagagagggaaggggtaagagagggagaggaggagagaaagggaggaagaagcagagagtgaatgttaaaggaaacaggcaaaacataaacagaaaatctgggtgaagggtatatgagtattctttgtactattcttgcaattatcttttatttaaattgacatcgggccgggcgcagtggctcacatctgtaatcccagcactttgggaggccgaggcaggcagatcacttgaggtcaggagtttgagaccagcctggcaaacatggtgaaaccccatctctactaaaaatacaaaaattagcctggtgtggtggtgcatgcctttaatctcagctactcgggaggctgaggcaggagaatcgcttgaacccgtggcggggaggaggttgcagtgagctgagatcatgccactgcactccagcctgggcgatagagcgagactcagtttcaaataaataaataaacatcaaaataaaaagttactgtattaaagaatgggggcggggtgggaggggtggggagaggttgcaaaaataaataaataaataaataaaccccaaaatgaaaaagacagtggaggcaccaggcctgcgtggggctggagggctaataaggccaggcctcttatctctggccatagaaccagagaagtgagtggatgtgatgcccagctccagaagtgactccagaacaccctgttccaaagcagaggacacactgattttttttttaataggctgcaggacttactgttggtgggacgccctgctttgcgaagggaaaggaggagtttgccctgagcacaggcccccaccctccactgggctttccccagctcccttgtcttcttatcacggtagtggcccagtccctggcccctgactccagaaggtggccctcctggaaacccaggtcgtgcagtcaacgatgtactcgccgggacagcgatgtctgctgcactccatccctcccctgttcatttgtccttcatgcccgtctggagtagatgctttttgcagaggtggcaccctgtaaagctctcctgtctgactttttttttttttttagactgagttttgctcttgttgcctaggctggagtgcaatggcacaatctcagctcactgcaccctctgcctcccgggttcaagcgattctcctgcctcagcctcccgagtagttgggattacaggcatgcaccaccacgcccagctaatttttgtatttttagtagagacaaggtttcaccgtgatggccaggctggtcttgaactccaggactcaagtgatgctcctgcctaggcctctcaaagtgttgggattacaggcgtgagccactgcacccggcctgcacgcgttctttgaaagcagtcgagggggcgctaggtgtgggcagggacgagctggcgcggcgtcgctgggtgcaccgcgaccacgggcagagccacgcggcgggaggactacaactcccggcacaccccgcgccgccccgcctctactcccagaaggccgcggggggtggaccgcctaagagggcgtgcgctcccgacatgccccgcggcgcgccattaaccgccagatttgaatcgcgggacccgttggcagaggtggcggcggcggcatgggtgccccgacgttgccccctgcctggcagccctttctcaaggaccaccgcatctctacattcaagaactggcccttcttggagggctgcgcctgcaccccggagcgggtgagactgcccggcctcctggggtcccccacgcccgccttgccctgtccctagcgaggccactgtgactgggcctcgggggtacaagccgccctcccctccccgtcctgtccccagcgaggccactgtggctgggccccttgggtccaggccggcctcccctccctgctttgtccccatcgaggcctttgtggctgggcctcggggttccgggctgccacgtccactcacgagctgtgctgtcccttgcagatggccgaggctggcttcatccactgccccactgagaacgagccagacttggcccagtgtttcttctgcttcaaggagctggaaggctgggagccagatgacgaccccatgtaagtcttctctggccagcctcgatgggctttgttttgaactgagttgtcaaaagatttgagttgcaaagacacttagtatgggagggttgctttccaccctcattgcttcttaaacagctgttgtgaacggatacctctctatatgctggtgccttggtgatgcttacaacctaattaaatctcatttgaccaaaatgccttggggtggacgtaagatgcctgatgcctttcatgttcaacagaatacatcagcagaccctgttgttgtgaactcccaggaacgtccaagtgctttttttgagattttttaaaaaacagtttaattgaaatataacctacacagcacaaaaattaccctttgaaagtgtgcacttcacactttcggaggctgaggcgggcggatcacctgaggtcaggagttcaagacctgcctggccaacttggcgaaaccccgtctctactaaaaatacaaaaattagccgggcatggtagcgcacgcccgtaatcccagctactcgggaggctaaggcaggagaatcgcttgaacctgggaggcggaggttgcagtgagccgagattgtgccaatgcactccagcctcggcgacagagcgagactccgtcataaaaataaaaaattgaaaaaaaaaaaagaaagaaagcatatacttcagtgttgttctggatttttttcttcaagatgcctagttaatgacaatgaaattctgtactcggatggtatctgtctttccacactgtaatgccatattcttttctcacctttttttctgtcggattcagttgcttccacagctttaatttttttcccctggagaatcaccccagttgtttttctttttggccagaagagagtagctgttttttttcttagtatgtttgctatggtggttatactgcatccccgtaatcactgggaaaagatcagtggtattcttcttgaaaatgaataagtgttatgatattttcagattagagttacaactggctgtctttttggactttgtgtggccatgttttcattgtaatgcagttctggtaacggtgatagtcagttatacagggagactcccctagcagaaaatgagagtgtgagctagggggtcccttggggaacccggggcaataatgcccttctctgcccttaatccttacagtgggccgggcacggtggcttacgcctgtaataccagcactttgggaggccgaggcgggcggatcacgaggtcaggagatcgagaccatcttggctaatacggtgaaaccccgtctccactaaaaatacaaaaaattagccgggcgtggtggtgggcgcctgtagtcccagctactcgggaggctgaggcaggagaatggcgtgaacccaggaggcggagcttgcagtgagccgagattgcaccactgcactccagcctgggcgacagaatgagactccgtctcaaaaaaaaaaaaaaaagaaaaaaatctttacagtggattacataacaattccagtgaaatgaaattacttcaaacagttccttgagaatgttggagggatttgacatgtaattcctttggacatataccatgtaacacttttccaactaattgctaaggaagtccagataaaatagatacattagccacacagatgtggggggagatgtccacagggagagagaaggtgctaagaggtgccatatgggaatgtggcttgggcaaagcactgatgccatcaacttcagacttgacgtcttactcctgaggcagagcagggtgtgcctgtggagggcgtggggaggtggcccgtggggagtggactgccgctttaatcccttcagctgcctttccgctgttgttttgatttttctagagaggaacataaaaagcattcgtccggttgcgctttcctttctgtcaagaagcagtttgaagaattaacccttggtgaatttttgaaactggacagagaaagagccaagaacaaaattgtatgtattgggaataagaactgctcaaaccctgttcaatgtctttagcactaaactacctagtccctcaaagggactctgtgttttcctcaggaagcattttttttttttttctgagatagagtttcactcttgttgcccaggctggagtgcaatggtgcaatcttggctcactgcaacctctgcctctcgggttcaagtgattctcctgcctcagcctcccaagtaactgggattacagggaagtgccaccacacccagctaatttttgtatttttagtagagatggggtttcaccacattgcccaggctggtcttgaactcctgacctcgtgattcgcccaccttggcctcccaaagtgctgggattacaggcgtgaaccaccacgcctggcttttttttttttgttctgagacacagtttcactctgttacccaggctggagtggggtggcctgatctcggatcactgcaacctccgcctcctgggctcaagtgatttgcctgcttcagcctcccaagtagccgagattacaggcatgtgccaccacacccaggtaatttttgtatttttggtagagacgaggtttcaccatgttggccaggctggtcttgaactcctgacctcaggtgatccacccgcctcagcctcccaaagtgctgagattataggtgtgagccaccacacctggcctcaggaagtatttttatttttaaatttatttatttatttgagatggagtcttgctctgtcgcccaggctagagtgcagcgacgggatctcggctcactgcaagctccgccccccaggttcaagccattctcctgcctcagcctcccgagtagctgggactacaggcgcccgccaccacacccggctaatttttttgtatttttagtagagacgggttttcaccgtgttagccaggagggtctcgatctcctgacctcgtgatctgcctgcctcggcctcccaaagtgctgggattacaggtgtgagccaccacacccggctatttttatttttttgagacagggactcactctgtcacctgggctgcagtgcagtggtacaccatagctcactgcagcctcgaactcctgagctcaagtgatcctcccacctcatcctcccaagtaattgggactacaggcgcaccccaccatgcccaccttatttatttatttatttatttatttatttattttcatagagatgagggttccctgtgttgtccaggctggtcttgaactcctgagctcaagggatccttttgcctgggcctcccaaagtgctgagattacaggcatgagccaccgtgcccagctaggaatcatttttaaagcccctaggatgtctgtgtgattttaaagctcctggagtgtggccggtataagtatataccggtataagtaaatcccacattttgtgtcagtatttactagaaacttagtcatttatctgaagttgaaatgtaactgggctttatttatttatttatttatttatttatttttaatttttttttttgagacgagtctcactttgtcacccaggctggagtgcagtggcacgatctcggctcactgcaacctctgcctcccggggtcaagcgattctcctgccttagcctcccgagtagctgggactacaggcacgcaccaccatgcctggctaatttttgtatttttagtagacggggtttcaccatgctggccaagctggtctcaaactcctgaccttgtgatctgcccgctttagcctcccagagtgctgggattacaggcatgagccaccatgcgtggtctttttaaaattttttgattttttttttttttgagacagagccttgctctgtcgcccaggctggagtgcagtggcacgatctcagctcactacaagctccgcctcccgggttcacgccattcttctgcctcagcctcctgagtagctgggactacaggtgcccaccaccacgcctggctaattttttttggtatttttattagagacaaggtttcatcatgttggccaggctggtctcaaactcctgacctcaagtgatctgcctgcctcggcctcccaaagcgctgagattacaggtgtgatctactgcaccaggcctgggcgtcatatattcttatttgctaagtctggcagccccacacagaataagtactgggggattccatatccttgtagcaaagccctgggtggagagtcaggagatgttgtagttctgtctctgccacttgcagactttgagtttaagccagtcgtgctcatgctttccttgctaaatagaggttagaccccctatcccatggtttctcaggttgcttttcagcttgaaaattgtattcctttgtagagatcagcgtaaaataattctgtccttatatgtggctttattttaatttgagacagagtgtcactcagtcgcccaggctggagtgtggtggtgcgatcttggctcactgcgacctccacctcccaggttcaagcgattctcgtgcctcaggctcccaagtagctgagattataggtgtgtgccaccaggcccagctaacttttgtatttttagtagagacagggttttgccatgttggctaagctggtctcgaactcctggcctcaagtgatctgcccgccttggcatcccaaagtgctgggattacaggtgtgaaccaccacacctggcctcaatatagtggcttttaagtgctaaggactgagattgtgttttgtcaggaagaggccagttgtgggtgaagcatgctgtgagagagcttgtcacctggttgaggttgtgggagctgcagcgtgggaactggaaagtgggctggggatcatctttttccaggtcaggggtcagccagcttttctgcagcgtgccatagaccatctcttagccctcgtgggtcagagtctctgttgcatattgtcttttgttgtttttcacaaccttttagaaacataaaaagcattcttagcccgtgggctggacaaaaaaaggccatgacgggctgtatggatttggcccagcaggcccttgcttgccaagccctgttttagacaaggagcagcttgtgtgcctggaaccatcatgggcacaggggaggagcagagtggatgtggaggtgtgagctggaaaccaggtcccagagcgctgagaaagacagagggtttttgcccttgcaaatagagcaactgaaatctgacaccatccagttccagaaagccctgaagtgctggtggacgctgcggggtgctccgctctagggttacagggatgaagatgcagtctggtagggggagtccactcacctgttggaagatgtgattaagaaaagtagactttcagggccgggcatggtggctcacgcctgtaatcccagcactttgggaggccgaggcgggtggatcacgaggtcaggagatcgagaccatcctggctaacatggtgaaaccccgtctttactaaaaatacaaaaaattagctgggcgtggtggcgggcgcctgtagtcccagctactcgggaggctgaggcaggagaatggcgtgaacctgggaggtggagcttgcagtgagccgagatcgcgccactgcactccagcctgggcgacagagcgagactccgtctcaaaaaaaaaaaaaaaaagtaggctttcatgatgtgtgagctgaaggcgcagtaggcagaagtagaggcctcagtccctgcaggagacctctcggtctctatctcctgatagtcagacccagccacactggaaagaggggagacattacagcctgcaagaaaagtagggagatttaaaaactgcttggcttttattttgaactgttttttttgtttgtttgttttccccaattcagaatacagaatacttttatggatttgtttttattactttaattttgaaacaatataatcttttttttgttgtttttttgagacggggtcttactctgtcacccaggctgagtgcagtggtgtgatcttggctcacctcagcctcgaccccctgggctcaaatgattctcccacctcagcttcccaagtagctgggaccacaggtgcgtgtgttgcgctatacaaatcctgaagacaaggatgctgttgctggtgatgctggggattcccaagatcccagatttgatggcaggatgcccctgtctgctgccttgccagggtgccaggagggcgctgctgtggaagctgaggcccggccatccagggcgatgcattgggcgctgattcttgttcctgctgctgcctcggtgcttagcttttgaaacaatgaaataaattagaaccagtgtgaaaatcgatcaggaaataaatttaatgtggaaataaactgaacaacttagttcttcataagagtttacttggtaaatacttgtgatgaggacaaaacgaagcactagaaggagaggcgagttgtagacctgggtggcaggagtgttttgtttgttttctttggcagggtcttgctctgttgctcaggctggagtacagtggcgcaatcacagctcactatagcctcgacctcctggactcaagcaatcctcctgcctcagcctcccagtagctgggactacaggcgcatgccaccatgcctggctaattttaaatttttttttttctcttttttgagatggaatctcactctgtcgcccaggctggagtgcagtggcgtgatctcggctgacggcaagctccgcctcccaggttcactccattcgcctgcctcagcctcccaagtagctgggactacaggcgctgggattacaaacccaaacccaaagtgctgggattacaggcgtgagccaccgcacccggcctgttttgtctttcaatagcaagagttgtgtttgcttcgcccctacctttagtggaaaaatgtataaaatggagatattgacctccacattggggtggttaaattatagcatgtatgcaaaggagcttcgctaatttaaggcttttttgaaagagaagaaactgaataatccatgtgtgtatatatattttaaaagccatggtcatctttccatatcagtaaagctgaggctccctgggactgcagagttgtccatcacagtccattataagtgcgctgctgggccaggtgcagtggcttgtgcctgaatcccagcactttgggaggccaaggcaggaggattcattgagcccaggagttttgaggcgagcctgggcaatgtggccagacctcatctcttcaaaaaatacacaaaaaattagccaggcatggtggcacgtgcctgtagtctcagctactcaggaggctgaggtgggaggatcactttgagccttgcaggtcaaagctgcagtaagccatgatcttgccactgcattccagcctggatgacagagcgagaccctgtctctaaaaaaaaaaaaaccaaacggtgcactgttttcttttttcttatcaatttattatttttaaattaaattttcttttaataatttataaattataaatttatattaaaaaatgacaaatttttattacttatacatgaggtaaaacttaggatatataaagtacatattgaaaagtaattttttggctggcacagtggctcacacctgtaatcccagcactttgggaggccgtggcgggcagatcacatgagatcatgagttcgagaccaacctgaccaacatggagagaccccatctctactaaaaatacaaaattagccggggtggtggcgcatgcctgtaatcccagctactcgggaggctgaggcaggagaatctcttgaacccgggaggcagaggttgcggtgagccaagatcgtgcctttgcacaccagccaaggcaacaagagcgaaagtccgtctcaaaaaaaaagtaattttttttaagttaacctctgtcagcaaacaaatttaacccaataaaggtctttgttttttaatgtagtagaggagttagggtttataaaaaatatggtagggaagggggtccctggatttgctaatgtgattgtcatttgccccttaggagagagctctgttagcagaatgaaaaaattggaagccagattcagggagggactggaagcaaaagaatttctgttcgaggaagagcctgatgtttgccagggtctgtttaactggacatgaagaggaaggctctggactttcctccaggagtttcaggagaaaggtagggcagtggttaagagcagagctctgcctagactagctggggtgcctagactagctggggtgcccagactagctggggtgcctagactagctgggtactttgagtggctccttcagcctggacctcggtttcctcacctgtatagtagagatatgggagcacccagcgcaggatcactgtgaacataaatcagttaatggaggaagcaggtagagtggtgctgggtgcataccaagcactccgtcagtgtttcctgttattcgatgattaggaggcagcttaaactagagggagttgagctgaatcaggatgtttgtcccaggtagctgggaatctgcctagcccagtgcccagtttatttaggtgctctctcagtgttccctgattgttttttcctttgtcatcttatctacaggatgtgactgggaagctctggtttcagtgtcatgtgtctattctttatttccaggcaaaggaaaccaacaataagaagaaagaatttgaggaaactgcggagaaagtgcgccgtgccatcgagcagctggctgccatggattgaggcctctggccggagctgcctggtcccagagtggctgcaccacttccagggtttattccctggtgccaccagccttcctgtgggccccttagcaatgtcttaggaaaggagatcaacattttcaaattagatgtttcaactgtgctcttgttttgtcttgaaagtggcaccagaggtgcttctgcctgtgcagcgggtgctgctggtaacagtggctgcttctctctctctctctcttttttgggggctcatttttgctgttttgattcccgggcttaccaggtgagaagtgagggaggaagaaggcagtgtcccttttgctagagctgacagctttgttcgcgtgggcagagccttccacagtgaatgtgtctggacctcatgttgttgaggctgtcacagtcctgagtgtggacttggcaggtgcctgttgaatctgagctgcaggttccttatctgtcacacctgtgcctcctcagaggacagtttttttgttgttgtgtttttttgtttttttttttttggtagatgcatgacttgtgtgtgatgagagaatggagacagagtccctggctcctctactgtttaacaacatggctttcttattttgtttgaattgttaattcacagaatagcacaaactacaattaaaactaagcacaaagccattctaagtcattggggaaacggggtgaacttcaggtggatgaggagacagaatagagtgataggaagcgtctggcagatactccttttgccactgctgtgtgattagacaggcccagtgagccgcggggcacatgctggccgctcctccctcagaaaaaggcagtggcctaaatcctttttaaatgacttggctcgatgctgtgggggactggctgggctgctgcaggccgtgtgtctgtcagcccaaccttcacatctgtcacgttctccacacgggggagagacgcagtccgcccaggtccccgctttctttggaggcagcagctcccgcagggctgaagtctggcgtaagatgatggatttgattcgccctcctccctgtcatagagctgcagggtggattgttacagcttcgctggaaacctctggaggtcatctcggctgttcctgagaaataaaaagcctgtcatttcaaacactgctgtggaccctactgggtttttaaaatattgtcagtttttcatcgtcgtccctagcctgccaacagccatctgcccagacagccgcagtgaggatgagcgtcctggcagagacgcagttgtctctgggcgcttgccagagccacgaaccccagacctgtttgtatcatccgggctccttccgggcagaaacaactgaaaatgcacttcagacccacttatttctgccacatctgagtcggcctgagatagacttttccctctaaactgggagaatatcacagtggtttttgttagcagaaaatgcactccagcctctgtactcatctaagctgcttatttttgatatttgtgtcagtctgtaaatggatacttcactttaataactgttgcttagtaattggctttgtagagaagctggaaaaaaatggttttgtcttcaactcctttgcatgccaggcggtgatgtggatctcggcttctgtgagcctgtgctgtgggcagggctgagctggagccgcccctctcagcccgcctgccacggcctttccttaaaggccatccttaaaaccagaccctcatggctaccagcacctgaaagcttcctcgacatctgttaataaagccgtaggcccttgtctaagtgcaaccgcctagactttctttcagatacatgtccacatgtccatttttcaggttctctaagttggagtggagtctgggaagggttgtgaatgaggcttctgggctatgggtgaggttccaatggcaggttagagcccctcgggccaactgccatcctggaaagtagagacagcagtgcccgctgcccagaagagaccagcaagccaaactggagcccccattgcaggctgtcgccatgtggaaagagtaactcacaattgccaataaagtctcatgtggttttatctactttttttttctttttctttttttttgagacaaggccttgccctcccaggctggagtgcagtggaatgaccacagctcaccgcaacctcaaattcttgcgttcaagtgaacctcccactttagcctcccaagtagctgggactacaggcgcacgccatcacacccggctaattgaaaaatttttttttttgtttagatggaatctcactttgttgcccaggctggtctcaaactcctgggctcaagtgatcatcctgcttcagcgtccgacttgttggtattataggcgtgagccactgggcctgacctagctaccattttttaatgcagaaatgaagacttgtagaaatgaaataacttgtccaggatagtcgaataagtaacttttagagctgggatttgaacccaggcaatctggctccagagctgggccctcactgctgaaggacactgtcagcttgggagggtggctatggtcggctgtctgattctagggagtgagggctgtctttaaagcaccccattccattttcagacagctttgtcagaaaggctgtcatatggagctgacacctgcctccccaaggctttcatagatcctctctgtacattgtaaccttttattttgaaatgaaaattcacaggaagttgtaaggctagtacaggggatcccgcataccgttctcctccttttccccgttgtgaggacagtgcactgtattcactttcaacatccaaggtctgtgttgagagggtgagttgtgcggcccagcttgccccaagcccgtcttgccatcacgaaggatttcctgactcagctgaatctagctcaacaaagcaaaggactaactaagctgcagattttctctccgctgggcttagcctacattatttacacctgttttcagctggatgggaccaaactggggccttgacttctggggtttccacgtgatccccaaagaggagacatccattcattcactcaggtatttgcttgtgcacctactgtgcgccaggtgccagatccaggaattgaagcccaggaacaactcttgcagtgagctccccgggtttttgttttctgaacggtgggaagacaggtcagcaaatagccatgcacgtctgcacatgtgtggctggtgtctgcaggagtaccgagaagacggtgagctctgccctggatggcaacaggaaagggcatccctgtgcagctgtttgtcctggcacaggtggcaggctgccagcgggaccaggaagggaaggggaggatgcacaggtcggagggaacggaacgggcactgcaggtgcgctctgcgatgtgaggaaggaagcaaaggctggttccgggatgatgtcggagaagccttgcagcctagggcactgcccattccacgttacccagtgagtcaaagcctcccagaaagacatttagtcactcaaagccagtgcaggtctcagctttgtccggggaggaactttcactctagaaaacacgaactcatttccctttgaggaagttgtttctccaggatatcatttccagccaccatccaggatgctgggcaggtgctgcagtgcccaaggcacggctgccgaagaagcttgtcccttagaaaccccttgtggcctcggaggcgcctgcctgcctccctgagaatggaaccctgttgggccgccaggctcgctgggcaggtgctggggaaggctgggtcaccgtgctgagcccctcacaggcctgggagttgtgcttggggaggagagctcccagctctttggctgcctcccaatcatggccacatctcacaaacaataccactgtccacgaaaaatgaaaaggtgcctggttctaacccatggccccaaccatgaaagagcccttagaatgtgggggtttgactcgaacagtggctttgagtctcccaggggggattagtgtcctaatgccctgagttaatgaattgacttgttggacagggaaactcagtgaggttcattttctgtggggggacgtttgtcaaatgctgtgaaatcagttgtagcatacgcgacgctcagctgctccgacagtgactcagccacggctccagctgcttccccagccctgtagtggaggtggcagatggtgtcatcagcctggcgcagagggctgtgcccactggcatcacaagggccaggcctgctggtcctccagccactggatccaggtagttacatatgggtttaaaagaagagaggcagggccagttgcggtggctcatgcctgtaatcccagcactttgggaagccgaggtgggtgatcatttgaggttaggagttcaagatcagcctgaccaacatggcgaaacccagcctccactaaaaatacaaaaaaattagctgggcatagtgctgggtgcctgtagtcccagctactcaggaggctgaggcaggagaattgcttgaacccggaaggcagaggttgcaatgagtcaggatcatgccactgcactccagcctgggcaacagaacgagactctaaaaaaaaaagatcaataaataaaataaaaataagagaggcagggtgggaatattacttgaggccaggagtttgagaccagcctgggtaacaaagcaagaccctgtctctaccaaaataataatttaaaaaattacccgggaatggtgtgacatgcctgtggtcccagctactctggaggctgaggtgggaggaacactcgcacataggaagttgaggctgcagtgagccgtgatcacaccactgcaccactctagcctgggtgacagagcaagacctcatctctggggaaaaaaaaaaaaagaagaggcttggaagccacattgttttttgtcacttataactagagtttcgtccatcaaaagcccattctgcactgatttcagtgataggggtctgatgctggcttggaagagggcctgacagcttagagacaggcttggagttccaagttgatgaaagaacgatgaataatgaaaaataatgtgttgttctaaagtagtgccttttcatactgagctagggtataatttgggtccatttcaagggaaatatactagcagaattcatcaaagtagcccctcgaagactggtgcctgctgcctacgggacaatttaatcagtggttccagctgcacatctagagttgggaacactgaacccaggctttctcatgcagatggggtgtggattgctaaggtggctgtctcctagcgctgcagcatgagtgaaacacgtgtccattctacagagacgcggctccgtgatgctgaaacctccttctttttttttttttttgagacggagtcttgctctgtcgcccaggctggagtgcagtggcgatatcttggctcactgcaacctccgcctcctgggttcatgcaattctcctccctcagcctcctgagtagctgggactacaggcgcgtgccaccatgcctggctaatttttgtatttttagtagagacagggtttcaccgtgttagccaggatggtctcgatctcctgacctcgtgatctgcctgcctcggcctcccaaagtgccgggattacaggcgtgagccactgcaccccgctgaaacctccttctagataacagcggcgttaagcatttttttttttttttgagatagagtgttgctctgttgcccaggctggagtgcagtgatgcgatctcggctcactgcaacctccacctcccaggttcaagcaattcttctgcctcagcctcccgagtagctgggactacaggcacacgccaccaggcccagctaatttttgtatttttagtagagacggggtttcagtatattggccaggctggtctcgaactcctgacctcatgatccacccgtctcagcctcccaaagtgctgggattacaggcgtgagccactgcacctggccaaaacctcctcctagataacagtggcgttaagcattttttttttttttgagatggagtcttgctctgttgcccaggctggagtgcagtggtgtgatctcagttcactgcaacctctgcctcccgggttcaagtgattcttctgcctcaggctcctgagtagctgggataacaggcatgagccaccactcccagctaatttttgtatttttagtagagacagggttttgccatgttggccaggctggtctggaactcctgacctcaagtgatcctcccacctcggcctcccaaagtgctgagattacaggcgtgagccactgcacctggcctttttttgttttttaagacagggtctcactctgttgatcacagccacagctcactgcagcctcaacctcctgcctgggttcaagcaatcctcccaccttggcctcccaggtagctgagaccacaggcacaagccaccatatctggccctacgtaagctttatgtgggtgcaataacagatctcaaaccagctctcagctcaagagaaggggaagctgggcacagtggctcacgcctataatcccagcactttgggaagccgaggcaggaggatcacttgaacccaggagttcgagaccagcctgggcaacatagggagacccctgccctccctgtctctgaaaaaaaaaaaaaaaaaaaaagaaaggagaggctgggcttggtggctcacacctgtaatcccagcactttgggaagcccaggcaggaggatcacttgaaccctggagtttgagtccagcctgggcaacatagggagaccttgtctctaaaaaaataaatagagtgagagagagaaggggaagtcaccgggaggacacacatggagcacgcagcccaaatggggctcctctgttctccctgcagagtcagttcgtacctttcacatgcacaaaggtgttgatccaaccgaagcaatattgattcttgttatattgctttattgtggggtcagtgtcagagtaccacgagttttcatcacgcaccgttctttccccagctgcagtgtgtttagggggggaacgaggccccaccccctatccctatcgcctctgcctttataacggctgctactctctgagcacctgttgagttctttcaccttccagatctaatgtgctatccccacccctagagaacagggctgctggatgccacatggctcccagagaggggctgtggtcagggaagccccagctccaagggggctggaaaaccccagagctgcccacgtgcggcaacacagtctggtgctgcaggtgtgaggacggctacaaaatacctgagccattctgtcactctgtctgaactctgtttgaaatattgtttcaataactgctaggctggtttttccttcctgactatattcctcaaaccaacaagagcctagcagaggaaagcatggccaaaacgccccaagaagagagccttggcttcacctccaagggccaccatccgggaggatgtcctcagacctctgatcccctctctgcaggctctgcccagccctgtgtggcaacccagaggaagcctccccttcgtttgagatttaaccccagaccttaggcgatggctgcccagcctgtcccttccgcctgtgtggctgcccacgcgggcgttgctcatggggctagtcctgggtggatgggtgggggcctctcgccggctcctctgcctcccacccccactggcaccccacgcctgtcctagaaggttctttctgcctgttttctccgtgagtgactggacaggcagaggccggccttgctggagggggcatttgtaattatgagtgaatccaaaacaaggttttttccttccgcagccccccgcccggctgtggggcccagccactgcacttcaccggatgccgtctggttggtcctcaggactgatacagaccaggaccccagggccagcccgtgccaggctcctatgcttccaggagcacgggtgggtggtcctgctgcctggccggccatcctcctggggtcggtctctggccgatcctccctcctcctctcaagccctgcacagcccggccaggcaggtgcatcttgtttggctgctgaggagccgggggttcagggaaattaaggaacgtgcccagggacccggggccagcccgtggggacgctgggattggagcccaagccccaggttcgccgcgcggctctcgacttcctctcctttcccccaggggcgagctcagcgaccgcagagaggtggggtcgatctccctgcgaccccagggggcccgcgaggccagtgcgcgggcaggagcggggacgtgctcagaagagccgggcgccgccgcgcccgcccgccccccgtcccccggctcccggctccgcgcgccccccgccgcccccggggccctgctacccccgacccgtcccctcccgccggccgcccccatggcccggctgggcgcgctgctcctggccgccgccctgggtgcactgctcagcttcgcgctcctggccgccgcggtcgccagcgactactggtacatcctggaggtggcggacgccggcaatggcagcgcctggcccgggcgcgcagagctgctctcctcgcactcggggctctggcgcatctgcgaaggtaaccggccaccgcgccggccctcctccctccgcgacctcgtccctccgacacccccttaaccccgccctgctcgtgttgccccgccagacccccttccaggacccctctcttgcatcccgctctgccccagggtgtctctccgctccctccccatcaccctccgtcttcccccaaaactgacagcccaagggctacaggagggagggagcccagttcggggcccctcacagccggaggagggggctgtggggcgacagtgggggagggaagcctagaggtgtgtagttggggggcctcatccaagtcaccaggggttgtttcttgatcacgctccccggggtttgggcctggcagccccttgtccccgtccctgtcaggcactgtcagagctgttcaccccacacctcctgatgccgcgggggcaggggttccaaatgtgtacagaggcttcagagtccggggagagagaaggggatcccagcaggctggagggtccacagggccccctccgttccccccagctccctcctccggagctggggccagcctggggagcttccccttcacagcgcgagggctggcagggcaggggtgtgtgtgtgagtgagcatgtgtgtgcatctgaatatgtgtgcatgtgctgaacatgaacatgtgtgagcacctggctgtgtatgtaaatatgaatatgtgagtgtgagtgtatgtagttgtgtgtgcatgtgaatatgagtgtgtgagcatgtcagtgtgcatgtgtgtgcatgtgagagtgtgtgggcatgtatatgagtgagtgcatgtgtgggtggtgcacatgtgctggtggcttcctcagtgcaactggggaggagttaggagccttgtgttcatccaacagactgcctaactgtgctccaaagacctcctgacatgcacctgtgtgcacgtgtgcacacgcctgtgcctatgcaggtggctctgcacgcgtgtgagaaccagagagtatgtatgcccacatgacacgagtcaggaagattccagagcgaggcttcccaggagcccgttttgtacaccctttttcctttcaggcaaagcctgagttccacacacaaacgcattacaaggacccctgcctgagggactctgagggggcctccatggagcgtttgaaagtttaaacatgcacctgtgcaggcataacttgcacgtgaaaataaacaaggtgaaggctgggcccggtggcccacgcctgtaatcccagcactttgggaggccgaggcgggtggatcacgaggtcaggagatcgagaccacagtgaaaccccgtctctactaaaaatacaaaaaattagccgggcacggtggcgggtgcctgtagtcccagctacttgggaggctgaggcaggagaatggcgcgaaaccgggaggcggagcttgcagtgaaccgagatcgcgccactgcactccagcctggggtgacagagcgagactccatctcaaaaaaaaaaaaaagaaaaagaaaataaacaaggctaaaggtcttgggccttttcatcccacttggagtcccagccctgagtttcagcagaagagaagctggcagggccctgtggtgccagggggtcccctgggctcgggtaggctgctgggtgcaccacagcgtccaggccccaggcttcgaggcctatgtttcccagggcagaacggctgcatcccgctggtcgacccttttgccagtgagagcctggacgtctccacctcggtgcagcacctcatctgtgagtcctgggtggggccacctccccatcctttccaaatattcaggcaaggcagatcccagccatccccatccccatcccgcagcactgcttccactgcccctgcgtttccaagaggacgtttccacgcagacctgtcccagtgctgtgctgctgtccctaaccacaggtgcccagctcccagcctatcctgttttcccctgtctcagtttccctctcagtggtgatggctcatccctttgttattggggaagccaggcagctcccagcttggctggatcctgcgggccttgcagactcctggctccccatttaggactcgattcttccagatggcctgctgtctacctggctggcaccttccacctggcgggttgggggacatgtgaggcctggggatgggggctgggagtgttctggggacgcctcccctcctggccttaggaagcccctgccagagtcagagggggccactgggagggtccagtggtgtccacagagatgggcgtcagccgcttttcctgagaagacgaagcaccacgtcactgtcctccggcagacaagtgctgaagggcccacctggaccagaattctcacctgagccccctttcctgcagtgctgcaccgtgcagtcattgtggtcctgcccctgagcctggtccttctcgtgtgtggctggatctgcggcctgctcagctccctggcccagagcgtgtctctgctgcttttcaccggctgctacttcctgctggggagtgagtctggggccctgggggaatggctccaaagatgggagctgggccacaggtcccgggagtggggtgctgcctctcctgttgccctcgtcccctgctcccttctgggcgggtgctgagtctggcgatggagccgtggcaggcagctccctgtggttccagaaggtacccatgtatatttgttctcacgttgctataaagaaatgcctgagactgcgtaatttataaagaaaagaggtttaggccgggagcagtggctcatgcctgtgatcccagcactttgggaggctgaggtgggtggatcatctgaggtcaggagttcaagaccagcctgaccaacatggtaaaaccccatctttactaaaaacacaaaaattagctgggcttataaagaaaagaggtttaattggctcatggttctgcatgctgtagaggaagcatgatgcttggcttctggggaggcctcaggaaaatgacaatcacaggcggaaggccaaggcagggagccagcatttcacatggctgggacaggaggaagagagtagggaggtgttacacacttttttttttttttgagatggagtttcgctcttgttgcccaggctggagtgcaatcgcatgatctcgactcactgcaacctccgcatcctgggttcgagcaattctcctgcctcagcctcctgagtagctgggattacaggcatgcgccaccacacccagctaattttgtatttttggtagagacggggtctctccatgctggtgaggctggtcttgaactcctgacctcaggtaatccacctgcctcagcctccctaagtgctgggattataggtgtgaggcaccgttcccagctgggtgctacatagtttttttttttttttttttgagacggagtctcgctctgtctcctaggctggagtgcagtggcgcaatcttcgctcactgcaagctctgcctcccaggttcatgccattctcttgcctcagcctcctgagcagctgggactacaggcacctgccaccacgcccggctaatttttttgtatttttagtagagatggggtttcaccatgttagccaggatggtctcaatcttctgaccttgtgatcctcctgcctcggcctcccaaagtgctgtgattacaggcatgagccaccatgcccagccctgggtgctacatacttttaaacaaccagatctcagaactcactcactatccagagaacagcaccaagggaaatggtgctaacccattcatgggaagccactgccatgatccagtcatctcccaccaggcgccccctccaacactggggattatcattccacatgcgattcgggccgggacaccaaaccctagcaccgtgataggagcagggcttctggttgtgggtcagagcctgggacagggaggagcaccggggtccaagcttcttggtgcggggggcatgagggcctccagggcaaccccaggacctgctctactgggtcagatcatgcgggggggcctggggccagcccctcaccacacccttctccttcctgtactgtcctggtgggaggagcaagggttccggggtttggcacagatgaggcagggccaggcatgaaggcaggtgagacagggcaccagaggcctcagctctgaccccagcacaggctgagactgtaaccggtaaccacccatccactgacgcggctccagctctgactacatgccgagtgctggccaagtgctcctccgaaggctcctccgagggccccccagtcccagctgcaggtgagaaatctgaggcctggagagggccgagggcctgggctccccttcacccccactggtgctgtctcctcagtttccaccgactgcccagcactggctgttgcggaaggtggactaggggctcctgacagtctgtcctcagccgcccctgtcaatcaaggctaggcccgagccaggccctgatgtctcaggccagctccactgtcaaggctgtggccacaaggagcagaccatccagggctgggggcaccctccctgtttctctgggaggcctctgtcactgaggaggcccgactgggtgcagagattggggaaaccagcagccttggtattggtcacaggccacatgagaacaacagtgaagtcaaggtctcctctagacaatgaaatcaggaagaatccaaatgacctgaccctgcggcccatctgtgagtgttcaaaatccaattaagaggaccttcgggagccagcgactagagtgtaattgggttgggattgtaaccagaagaacttacagggacacggaccctctgcattgtgcctgggagcgaaggcaccggctagggggtggaggggccggaggtagctggtggatgggtgggggttccactgcgactccagcctccccaggcagagggggcctccatcctagtatgagggtcagctgtgggccgaagcacagagggctctcaggatgtcacaccaaaggcacctgcccagggtcagctcggccctcacccctcactagcactgcaaggagggggagggagatagagggccccagatcgattgggtgcccttccctgagacaggatcttggggggcctgggggaccgacagggcccacggtgacagagtcctttagagtttcccagcttgaggttgcaggtgccagccgcagaggcctcctttaggaggtctgccaggagctgagcctgggccccatcaccagggatttgggaggtacttcaggtcccagtttgggagcttactcttcaccttcattttgggagaaaggccgtgtcctcggccaggctacaggaggcagctggtgtttggagagggctcagctggtggggcggcctgccaggaagtggggccttgggctgcagctgcagccagtgctacaggcagagacaggcagagacaggcacctcctgccgcacggtcagcccccgctgctgggggctgacccccacccctgcttctcccagggaccgcttcattcaatttggcttcacattcttccccaaaataaatccataatttctgttgctacgctgcccagccgggcaggcatccgtgtgtcctccctccctcagcctccccatgccttcttctccccactctctgtcccactcttcttcccaagtttggttcccaggaggaatcacagaagaccaggctgtgttgtgccccttcactgggcaccagtgagatccagacctggccctgaatgtcagcttgggtcagttgccttcttttggctgggcagtgcccagaggggaccctgtgcacccaggaagtgcctgtggggaaatcagggccacctgcccccctggctaacattccctacagtcggcgccaaggacaggctttctcatcagcctgaagctgtgggaagggggtggcactccgggctggttcctccaagctcagtggacaggaaaatgccctggaggcatgggccgagtcccctacctagctcgttgctggaccctgaactgccggatgaagcctggtgcccgccaccctgtgcaaagcccagcttcattcctttgacaacagctttgaccatgtggagagcgggagggaggagagaggagggcccagggcaggcatcctcccctggggaagggcctgaaactcagagctgggaggacaggggggctctggaaggggagtcagagggagggggatgttagccccggaggtagggagggcaaaggtgtgaggaagaggaggcgggggtgcagggcagggactcactctgatcagagcactgggcaacgctgctgccagcagaggccatggctctgtgtgtgtgtgtgtgtgtgtgtgtgtgtgtgtgtgaatgtgtgcaaatgtgttcgtgtaggtgtgcatgtgcatgtgtgtgctgggggccatggagggtacagagtgtgtggggggcagttatgtgagtgggaaccatgttgaggggcaggtggcactgtttgcaggaggctttatgggatgaggtctctgaggtttgaggactgaattggagcctcttaaagctccactccgccaaatgcagttgactacctttagccctgtccaaccccaagcaggaggtggtgtctgggagaggcggccaggttgacagccaggcagggctaaccatgacaggaagggcggtgtgctgcctgcagctctgcctgaatgctagcggggccggggatgctgaggccatgtctgcaggaccacctgggcctgggcccgctagagcagacaccgagcagctgccctccccatctctcccccaggtgtcctgacactggcgggggtcagcatctacatcagctactcgcacctggcctttgcggagacggtgcagcagtatggcccgcagcacatgcagggcgtccgcgtcagcttcggctggtccatggccctggcctggggctcctgtgccttggaggcattcagcggaaccctcctgctctcagctgcctggaccctcagcctgagccccccaatctgtggtcatctgagtccccagcaggtgggagggaggtaagagggggctgggtttccctttgcacctcccgggattgggcggtcagggccagggccccttgagagtctgggaatcccttctctgggcctcgctggggtcctggccaggaaggggctgggggtgacaaggggtggagggcagagccaagaatccagctcctcatgtttctctgtagatatttggggaggctcccctgccccggcaggcttgttagggactaattggttcaaccgcctcttagagatgagaagagccagtccagaaagaggaagtaagtggcccaggtgacacaggctgagtggcagagttgggtgggggcacctctcaagggtgtggcctgaactcgcccctcccccagcaggctagtgagtcactgctgcccccattcctaaggacctgggagaaaagtaggtgcctgttaaatgccgcaggactgggctccatgctcctctccagccccgcaatggccctactcaatgactaccctttatccattttacagagggggagactgaggcccagagcggcagagggacccacccagatcgcctggcgccagagagatgccgtctcaggccaaggcctccctggcctctgttctgtccactctccccgaagggcaggcttggtggagaagaggctgatgagagggcccgagagcccctccgatttgcaggggtggggggcaaggagctgagcgatccagatgtacccctctgccccctcccttgttctcaagcctgctaggtacttttcactgagcacttccgggaagagcaggcacccagatctctgtccttgtcctggcacaggctgctgctgcttccggcccccgacccttcctctctgcagcaacccgggggaggtatgccactgtgagtgccctggtgggcacactgagctggcagagatggaagtcccagaagggtggggtgggggtgtcatgccatggtggaggagtttggggccactccttgcctgcctcaaagggggcctggctgagggtgcttcttgaccacaggggccagggctgcctagggtggcgcagggctgggcctggagtttgggatgcaggcttgttaaacacagggcagaaccccaggttgggaggggctcagtttgcaggcccaggcccgcaggcccactgctggtcccagggtgagacaggtgagaagagggatggccagcacacacttgagtccccttgggccacaaaggctggggcacgcccaccgttatgcagatggacagttgaggtggctgcaggagaagggttcccagggcctgtacaacacgtggaagcactaaacggccccgtttggggtttgggggcccttcccgagtcttgagaggtcttgagaggtgtgctggggaaggtggcagcctcttgtagcttgatcttcctccaccctgccccacccctaggtctctttattgattcaaaggttaaggaagctcctgggggcttgagggggtggcacagttttggtggggcccagtgaggacaaatctggggggtgagcagggcctcctcttcctcctggtgtttgaacgtttaccattccatgtgggaccattgtgccaatttgtccttaagtaaatcacttgtgctgtgtgcagtataagccttttatttttcttagaacttttcaaaataggtaacacatgcctgtctgtcataaacagtacaaacgtgagcaaacactgtcaccagctgtgcgcgtgtctgtctgtccatccagaggtgttctgagagcgtgtgtgcacgtgtgtgtgtgtccactgtgaagtcatctgtagacatacaagcctacttcttattcccagatcagcacagggagtggggaggggggcctgggtctccgttttggaaacgggggctggcttcgtgggcatgtcctctcagcttgggaggaaaggtgtggcggactcttcctctcctcctcctggcccccaacttctgctgatgaggcttctcctgggggtttgctgggaagccagggatgtgagcctaacttcaggcctctcacggcagatgtgcttgggctctggggataggacactggggaagacacaccggggaggggctgctgggaccaccagcgttcccggagagtgtgtgtggtggggagggtgtgctgcttgacccttcccttccagaacagagctgcccaccttgcctccacgtgttctggggcgtgtggaacttagccaggccaggtaacttcttcactctctcattggccagccacatccctcaccctctggttggttagtggactccctcacgctctgattggctagtcaactccttcactctgactggccagccacatccctcaccctctgattggctagttgactccactctggccagttgatgccccacactctctgattggccagtcagtgttccttaccctctgaatggccagttaactccctcactctctggctagtctccacagtgattggcccaagggttctgtctgtgttcatggttctctgagtgtcaggctttgcagctgtgattaagaggcggatgagtgcctcccagggaagagacagtgcatggttcaaggtcacccagaatagacaacatgacatcaggctcaaatggtgctgcgtcgtttacagcaagaggagagagcctgtgcaccaaaaccgcttgcaatggtggttcccacggtgggatccactggcccacgtgggcctctttcttcaattttttcttagaatttttcaaaataggtaacacgtgcccttgtgccacaaatagcacaaaggcgagtaaacactgtcaccagctgtgcgcacgtctgtccatccagaggtgttctgtgtgtgtgtgagcaagcgtgtgcacgtgccagaaacaagccctgactcagaggcccttcccccagcatcgaaggcgcttgctcctctcgccacagcaaagccccttctccagggatggcccagctccgccaggtcctgggcccactggcatcccactcgggcatgtttatctgcaccacctggtaggtgcccctgccaggggcctgacctctgtgaggacaggggcctctcatcagctcaggccctatgcccaaccagcatttataaatgcagtaggcagcccgcaagagagcccccatctgtcctcatctcctggtgctcacgcctctgtaggccttaccacactgagtcagcgctgacttgggtgtcaagtaggaagtaccagcgtgtgagggggtcataaaaaggcagcttctgcctcggtctcagactgctcaccctaggggaagcaagtcatcagactgtgaagacactcaggaagccctgaggagatgctcacatggacaggactgaggcctccgccaacagcagcagcagcgtgtcagctgtgtgaggacaccacctgcgagaggattattcagataatgcagttctcactgatgtcttgacggcaacctcgtgagaaactccaaaccagaactttccagctgtaagccactcccaaattccgcctctcccccgctttttttttgagacagggtctcactctgtcacctaggctggagagcagtggctccatctcggctcactgaggcatggcccttctgggctcaagtgatcctcccacctcagcctctcgagtagctgggaccacaggtgtgagtcaccaggcctggttactttttttgtttgtttggttttggttttttttgagacagagtttttgctctgtcgcccagtctggagtgcagtggtgcgatcttggctcactgcaacctctgcctcccgagttcaagcgattctcctgcctcagcctcccaagtagctgggattacagatgcgtgctaccgtgcctggctgatttttgtatttttagtagagatggggttttaccatgttggccaggctgatctccaacttctgacctcaggcgataccccatgcctcggcctcctaaagtgctgggattacagacgtgagccaccacatccagccacctggctactttttgtgtttgtagagacggagttgcaccatgttggccaggctggtctcaaacttctgggctcaagcagtccacctgccccggcgttccaaagtgctgggattgactacaggtgtgcgtgagccaccacacccggctcactctccaattcctaacccacagtgctatgggaaataatgattgttgctttaaggcagtatgttttggggtcatttgttatgcagcaatggataaccaatataatgcacttttgctggtgcttgccccagacagggcagtaagggagacacggaattacaggggcttagagttactggcttccttctttttttttttttttttgagacggagtcttgctcttgtcacccaggctggagtgcaatggcgtgatatcggctcaccgcaacctccgcttcccgggttcaagcgattctcctgcctcagcctcctgagtagctgggattacaggcacctgccaccatgccctgctgatttttgtgcttttagtacagatgggggtttctccatgttggccaggctggtcttgaactcctgacctcaggtgatccacctgcctcggcctcccaaaatgctgggattacaggcatgcgagttgctggctttcttttgattctctgagttaccaccttctccagcacaggacagcagttctggggccctgggaactcctgtatacggatcttccacagtatggatctggattcttctaagagatggagggacagagggaaactcccctttgcctgccacgtggactcttctccccttacactcactgcagtccaagatttccaccgtcccctccctccctcccttccttccttttctttctttcatttctttcttgagacggagtttcactcttctctggtgcccaggctggagtgcaatggtgtgatctcaggtcactgcaacctctgcctcccaggttcaagtgattctcctgcctcagcctcccgagtagctgggattacaggtatgtgccaccacgcccggctaattttgtatttttagtagagatggggtttctccatgttggtcaggctggtcttgaattcctgatctcaggtgatccacccacctcagcctccctaagtgctgggattataggcatgacccaccacacccagcccatgctgtggtttctcatagctcttcctctagtccaggccccctcctgagctctgtgcttacattcctggcagcttcttaaccacctcttcttggggtctcaaagttaacaatcttaagctaaagtctctactttaccattctaaacaatcctccttctgggattcctattaagggctttctaaagcactgatctgactgtatacctcccctctttaatacacacacacacacacacacacacacacacacacacacacacacgcagagatttatatacatatatacatatccagaatgaaatagacaaaaatattaatagttattcttagatgataaaaatacaggtaatttttattttcttcttcttcttctttttttttttttttttttgagatggagtctcactctcttgcccaggctgaagtgcagtggcgggatctcggctcactgcaacctctgcctcctgggttcaagcacttcttctgcttcagccccctgagtagctgggattacaggcacgcaccaccaggcctggatacttttttgtatttttagtagagatggggtttgctatattggccaggctggtctcaaactcctgacctcaggtgatccacctgcctaagcctgccaaagtgctgggattacaggcatgagccaccatgcccagcctctttattctttttaatattatcacaagttatttatttatttatttatttatttatttattttttgagatggagttttgcccttgttgcccaggctggagtgcaatggcacgatctcagctcactgcaacctccacctcccgggttcaagtgattctcctgcctcagcctcctgagtagctgggattacaggcacatgccatcatgcctggctaattttgcatttttagtagagacagagtttctccatgttggtcaggctggtcttgaactcctgacctcaggtgatctgccctcctcggcctcccaaagtgctgggattataggcatgagccaccgtgcccagccattatcacaagttatttatacttcctttctcttgttcttgatcagtctcattagaggtttatcaattttattactcttttcaaagaactatcttttgtttatctggatattttctcttgatttatctccctcttcactaattctctctccagctgtgtctcatctactattcaacctatctactgagttcttaagttatcatatttttcagttctagaatttccatgtggccttcttatagttccaagattcctgccaaattttttttatcttgacttataattccttgaatattttattttttatttttttgagatgggggtctctctgtgtcacccaggctggaatgcagtggcacaatcttagctcactgcaacctccacctcctgggaggctcaagcaatcctcccacctcagtcccccatgtagctgggtctacaggtgccacatctggctaatttttgtacttttaagtagaaacagggttttaccatgttgcccaggctggtttcaaactcctgggttcaagcaatctgcctgcctcggactcccaaaatgctgggattacaagcatgagccaccacacccagcctagaatatttaatttaattaattaatttatttatttattttgagacggagtctcaccgtcacccaggctggagtgcagtggcgcaatcttggctaactgcaacctctgcctcccgggttcaagcgattctcctgcctcagcctccagagtagctgggattacaggtgtgtgccaccatgcccagctaatttttgtatttttagtagagatggagtttcaccatgtttgctaggctggtctcgaactcctgatctcaagtgatccacccacctcggcctcccaaagtgctgggattgtaggcatgagccaccacactcaagctatttatttttttagagatgggtctcgctctgtcacccaggttggagtgcagtggcatgatcacggttcactgcagccttgaactcctgggctcaagtgatcctcccacctcagcctcctgggtagctgggactacaggcacaagccactttgttatctgggtcacctaagggtctgtttctttttttttttttttggagacagagtcttgctgtgtcacacaggctggagtacaacagtgtgatcttggctcactgcaacctccacctcctgggttcaaatgattcgcttgcctcagcctcccgaatagctgggattacaggcccacaccactatgaccagctaaatttttttttggatttttagtagagatggggtttcaccatgttggccaggctggtctcaaactcctgacctcaagtgatctgcccgcctctgcctcccaaagtgctgggattagaggcatgagccactgcgcctggcctcttttgtccatttttttctcattttcaatcacatcttgtcccattctatacctggttatttctgattgagtgggggcatcccacatgaataactgtagaggaaattggaggctctgggagacgtcaccttcctccagagaagacggatctttacttctggcaggcagctaggccagaggcacccaccaccccagattgccgtaatcagggatcacagtgcttcacagctggcttcacttctcacgatggtcagtctacttccaattgcccttactcctagtgggtggcccctcagggactcaacccaaagcttgagggtttttttgtttgtttgtttgttttttgagacagagtcttgcttgagggactcttaccagggtctttcagcaggccttgaacttcagcttctgccctcagccctgtgtgcctgtgaaaagttctgctcagttcctcagctcccgagcagacgcgtcgaggaaaagtgtcccaaatgccaggctcacctctctaggttccctcttctcccagatcttgacctcacaattcatgactgccttgcaggctcttcagtactatcagattgtttgtttgtttatttgttgagacagggtctccctctgtcgcccaggctggaatgcagtggtgtgatctcggctcactgcagactccacctcctggacttaaatgatcctcctaccccaggctcccacgtagctgggaccacagatgcacaccccaccacgcctggcttcatttttttttttttgactgagtctgcctgaactaccctaagagttgctaaaagtaagatttactcccacatcatctacaatacagacatattattttgttaagcagagtaatttcttttccttttttttttttttgagacggagtctggctctgttacccaggccggagtgcagtggcgtaatctcggctcactgcaacccccacctccccagttcaagcgattctctcacctctgcctcccgagtagctgggactacgggtacgcaccaccacacctggctaatttttgtatttttagtagagatggggtttcaccatgttggccaggctggtctcgaactcctgacctcaagtgatccacccacctcggcctcccaaagtgctgggattacaggcgtgagccaccatgcccggccctgagtaatttattttctaaaaaggaaaatacgtattagaggaccacaagataaaatggaaatccctcaccacggcagttaaagccctgaccatcaagttcccatgtccctttctgcttccttctgacgtttcccttcctgaactcaggaagctgtaactggccacgtggccctgaagaaagggctcctctctgacctagagcgaaggcctgccccgctgcctcccgagctctggtgacgggagctggaagggtgtccttcctgtccctacaccctgtcccagacactggaggaattcagtgtgtgctgacaagcatgggggaggtcctaaccctgagtgttgtgggggtgaaggggaccaaagagccccaggagcaggtaacacctcctctgctgcctgcttgctgggaacacctccactccctgcttccaccccagcccgggcacagggtcccggtcactccgtcctcaggactccaacggcctcagcacaaactcccacttcctcagcaccagttcagtgtcctacaccgagacgtcgcggtgccacacggaagcacggactgctctgtccataggaacagtggcacgcacgccacgtggccagtgtgggccagctcatcagcactcacggcccgcaacccagccatgctcaccaccaccatgttcgtctccacgaaggtgggatcaactgagcagacggacaacaccagctcctggagtcctgggccaggtcctgaggtgagcagaggtgaccccaggccctgaccctgaccccattgccagcaaggtcacccgggaggcagggggcagttcggtcacggtaggagaaggaagggccctgtgtcctgacttggcctttgcagtcacacagactgggctctgctgcgtttagctatgtgatctcagacaaacctattgacctctctgggcctctgtttcctcattgtgaagtagggacatcatgggattgttggaggactcagtgagcagatggaagacccaggttagaggctctgccagactctgcagagcatcacaatcctggccgtccaccgagggcttccccaggctggactctgcgctgagtagggtctgctgaagcagctggtgccctgggtcccgccctagtgactcaatggccaccctgagtcccaggatccagaagcctgcaggcctgctgggggacccccgacggcacagctcaggccaagtcagaggaagcacagggaagcgagggtggggcgtcctgtccaggcaccttgggtgaatctctgggcgttcccatggtcttgccacagtgcctgctttgtgtcaaccagtcccaccagggccaccgcagccagcatccccacctggtgcatgcttccacccagggctttttggaggcgccaggcttcttcaatgaagtccttgggcctcccagccagggaccccactggggcgcccaggccctgggaggtggagaggagagactcctgccagctcacatccctgtccttgggccagggtggggacagatgcgtagccccatctgcagaggtgttaaaggggaacctggggccagctgccagggatggagctcaggaatccaaccctgcctcctgctggggcgccccaccccacctgtctgtgggaggccagcccagggctttcccaccttggagaggcagaaagacacagagtcacagtgctccacaatgtaggtgggcgggacatgcagggccagcaccacgttcatcagctgggccctgtccaggtggacccaggccccataggtctgggccaggaggtgcacctgggggtgaggtgcaggcagagtcagaggggccaggcctgagggaggcatagagggaggagggtcctgggcttagctgcctgaggaatcaggagggatcaggagacctggctggtgactggctctggtgatctgggacccaagcagtcaggctgtgctgcctaagcctccatgctgggctctgggaggatctgggggtgcacatttaacccagctttgtcgcacactgagcatgggccaaacgaccgtgggccaagggtaaatgtgtgtcacctcatttaggctgcacaacaactcgagggagacgccgctgctcccatttcacaggcaaggaacgcaaggcttggagagttaggctgctgcctaactagtgtctggtaaacagcagagctcagacactgcggcctcctcacctcgcacgtgggtggcaaggaccaggtggagggcactcacacgagcttgttcctgcagcctcatggggcacacgtttctgcgccagggcagcaggtcctggtgctgctctgggactcagctctggggacttgggggtgggggcatctctgctgttgggctggtgcagggactaggggccctgacctggggtaataattccctttgtgtctcagcctaggaccacacatgtgtccttcctgtgacaggtctggccgctgatgggtgcccatggcataaatcagaggggactgaaccccaggatgggccaggggcacaggaagccaggatcaggctggtggggggcacacagtggtggggctgggcctacctggcgtaggtagttgatggggaggatccggacccccgagatgctgtgtgagttctccaggcaaatgagctcgcagacctggtggtagggactctggaggccccgcgtgatcatcctctccagctcagccagtccagagtgcagtggggcagctctgggagggagtgggagtgcactccagccctctgtgggtcaggaagaggatgagggctgaggggtccaggggcacctcttggcggagtggggggctcctctggagtaaggagccagaccctgagtcctgtgtctgctcccccgaggcctgggccttggagcctttcctctgttctgtgcatctagacagacgtcccagctggggggcactgggcccctcccctattaactcttcagatgctgctgtctggctcccgtcgggagcgcgggagtgctccgagtgtccactagagggcaccaggcaccaagcaccgcccaggtgtctgcccggcaagcctggggccagccccagccgctgccgcccccacgtggcaaatctggggctctgctctccttccttcctcccctggagaggctgccatcccagccagcttctccatggctgtccctttctcccctccgcaggtcccagcctggtgcctgggaagggggtttgcccctgagcagcctgtgctggctggaggatgcccagggccccaggtgagcaatgcctgctccttacctgagccaccccaccctgctcatagacgtggaggtggcactcctgcccaaggaggagctgggagccccggcgccagcagtgacacatcactgagacagaaggagggcaggtcttggcattgagtctggaggcatgtggccctgctcagcgtggctaggctgagccctaaggctacagtcaactcacaaatgcctgaggccggcaaggaaacagcaccttcaagacacctcagtgctacgtgccagaagaccatcccattaaacacacaagtctaggatagctgtgctgcgctgggaatcgctgggccacacccagcctgcacacctgcgcctggaggcccctccacagagcatcgcctgctggagaagctgctgcaatgctgcttcttggtggacacgcagccgaggcacctgcagtcgtcagaccctggcaggaaacagacggcacacacacactgggaaactggcagtgtttaatcatgggacggtttatagaggggaggcaggagcagggaagcccggagaacaggcctgaggggtgagaggaaggtgtggctgcaggaacccggagccagggctatgtggagaggtccctgacgctggcccagaggccctggggaccctcggaagaggagctagggaggagcagacctgcagcccccactgtcctcctcccccatctccttccagggctccccaccaacccaacagaaatggaggaatgtggtccatgagtgtcagagcccccccatatgcactgaggacctgctaggcagacagaagtcgccctgcgctcaccagagatgaggttggccatagtgttggagggcacaaagagggtgcgccccagccctagcagctccacagccatttcttgcagctctgcggagggacagggaagccgctgtgcttgcacactcgggtgtcagcaccgtccatgctgctttccctgtgtcacttgggccagagcacgccctgagcccaggtgaggcccctagcccgaggctccggtgagcagctgagtgggtttggagccccatccaccagctgcacactctgtgggcttagcaaccacacatccagccccacagggccctcagtcaactctgcaccccacctaccctgggccatggcctctccccgctccccccaagaacctctcttgtggtttgaacctgtccccggcagacctcacacctgtctcacttcctttcccctcagccctttgcaggtggggcctgtggtttctctgctgacttcctttcctcgtcaggagggatgagtggggggctggacggggtgtgagggtgcagctggagggtgaggaaggctcccgctcttgctgtaaagcccactgtggtccccccaactgtggcatcaagtccttagcatgacactcagggctggagtgacctggcctctgccccccctcctcagagcctcctgcactctccacacctgccacatccccacctgcgccctgaagacctttctcaccagtctgcttctgctcctgaagacccctgccctgtgagccggcgctcccttccctgcctgggatgcttccactcagcctgcaggagggctcctctgtgaagcccccttccccgtgagccacagcctcgccccatcctctgcttcccagggcaccctctctagactcccatcaactcaagcgcctccccagcctctccttgagcggcagtgacttgttgacatgtgaggctgcctgggagcatggagatcagcatctccagcaacgctgggcagcagctggatacatgcttagccccagccatcccttaaccccttagcagacgggccctcgggattcaactggtgaccccatggcttgtcctggcctagctgaggggtgtgcacaccccaacagtcaaagtggttcactatggcaactcacaacccagggctggggctgggggtcgctgtaccctggagacactccctaggttattagaacccactccttgcgaggtgcagcctgtagaacctgcccctttctacatctattttccatttgccttctgtgggggaaggcagtgcaggagaacagttgtgggtttcagagtcagaagacccgggttcaaaccttggttctgccatttactaagtatggggcctggagcgcctccctccacatctcagaaccctcctctgcaagactggacatcacccatctcagggggcagctgggtgacaatgcaggacacacacaaccacctggtgagcctatagaaatgcaggttcttctcggcaggccatgtgaatctgcatttcttttatttatttatttttatttttatttttttttttttgagatggagtctcgctcttgtcgcccaggctggaatgcagtgggacgatctcagctcactgcaacctctgcctcccgggttcaagtgattctcctgcctcagcctcctgagaagctgggattacgggtgcccaccaccacgcccagataatttttgtatttttagtagagatggggtttcatcatgttggccaggctggtctcgaactcctgacctcgtgatccgcctgccttggcctctcaaaatgctaggattacaggcttgagccactgcgcccggccggaatctgcatttctaactttcaggtaacagcagcacgcacgcagacggcaagcctatcctgtggcaggtgttcattacacccatttatgtcggaggttgcaattttttgaatttttgccatcagaccttggcgatgaccttgagcagtaggacataaatacctcccagatgcttagcgttccaataatggaacactaggcataaatgggttttaagcgccaagggagccacttcccctgcgtcccagaccatcacggacagcgctccgctgccgcctccacgacccccggcctgcacgccggtcttcgccgtagtcgtcgtcccccacgaccgcctcggccatgacgcacctcatggccggcccgggcctggtcaccttgtcgctgcgcaggcccaccacgtaggctgcgacccccgcgctcccacaccccgcccggagcgccccatgtaccggggccgccgctcgggccagtctgcggagcatggcgcgggcagcgcccgactccccaccccggcgggagctgctgactcctctactccccagcgaaggcggcgagagcgacgtggtcggtgcggccagaattcctagagctgggaagcagccgccctgggccgggggtccagggagcgagccccgtggcacgctgggagttgtagttcgcgctccctcgcggcgggcgtgcgcgagcgtctgcgaacgggccccgtggcacgctgggagttgtagtacgggctgcgtcgcggcggagaaccagcgagcccgtgatgctgaagcagaaggttctgctcattgaaggagaaaccgaggccgagcgagtgtgtgtgtgtgtgtgtgtgtgtgtgtgtgtgtgtgtgtgtgtgacagagtctcgctttgtcgcccaggctggagtgcagtgacgcgatcttgactcactgcaacctccgcctcacaggtacaagcaattctcctgtctcagcctcccgagtagctgggattacaggcgcgcgccaccacgcccagctaatttttttttttttttgtatttttagtagagaggagttttcaccatgttggcctggctggtctcgaactcttgacctcaggtgatccacccgacttgacctcccaaattgctgggattacaggcgtgagccactgcacccagccctgggcgagcttttataacacagacgctcatgtggcacttgccatgtgccaggctctgccccaggccctttgcaaatgttagctcagttaaacctcccaacgactctaggagacaagcactattgctatccctgtcttgcagatggggaacaggagacgcggagctaacggacagctggaggccacttgggtaggaattggtccgggcggggtaccgctgtctccagagggcagccctaaatcactgtttcatgctgcccctaaaacacagcttccctcgtttaccatcttcagtattgatttgttgagcaagttcggtgcgccaggcagtgtccaggtgtccaggtgccaggctgggggacagggctatgtctccagccgggttccagtctaaggggagaccgctaaaagaatgcgtggggagcccctcctccataggcccctgcccctgggtggactgcctccatgggggcagggtggtgctgaagttcaagccagctgtgtggccttggacaagccatgtagcttctttgtgcctcggtttcctcaactgcagattgggctgttgtgagcattcagtgactggatatgtgtttggtgctgaccccaatgcctggcttgctgtaagctcagggtggtcaccccactgtggctgttttttaattttttaagacagggtctcactctatcccccaagctggagtgcagtggtgtgattacagctcagtgcattcttgacttcctgggcttgggtgaacctcccacctcagcctcccaagtagttgggactacaggcaagtgctactatgcctggctaatctttctgtgtttttcgtagagacaaggtcttgctgtgttgctcaggctggtctcaagctcctgagcccaagtgattctccctcagccccacaaagtgctgggattacaggcgtgagccatcacgacctgcccagctgtggctgttattatcattgtcgttactgatcccagcttggaactctgagggcccgggggctttggggtgaactctgacacagtctagactgtggggtgcccttcccccacacagggagcacaggcacccattgccactcagcggctcctcttcctctttctgtcccccataggagaaagatccaggaggggccacagctgctgggccaagcgtctggtgagggtggcccttggtgaggaggacacccatcctagatcagtcatggccaggcctttaccacaggccagctccaggtcaggcctggggacttagggcgagcagaggtggcctgccctccagagctcaggtcccaggggtgggggacaagatgctggccgtgagaggatggcagcgaggaagcagctctaacagtcccagtccaggcagcagggcaggctttttggaggaagcagtgattaggctgagcttcgaagatggagccgactttggacagagggatagcaggggtgaagcctctgggtagagaggagctgctgcgtttgtggccctgagggccagcgtggctggggaagtgagcaggggtggggatggagcccaaaagctacatccggggcctgatgacctctcaggggctctccatctctcttccttcagcttggtgggaattgtaagtacccgcagggtcagtggtcccaaggacacccatgtgatggacaggcttgctgccttcccctccccagagcccttctgggcctgacccacaatctgcaccaaattcctgcccttagaaaacaagccccttatctcattgtctggctccagaccttctgctgggaagtagggggcggggaacggaggcctctgtgggaaggaaaggaggtggtctggcggggcagggactgggggcagggatagcagcgctcaggggagaagggggacaaacaaatggacccccggcccctcgagctatggcagaatcacagaatggcctcctgtttgccaagcttcgcagtctgcaaagcctgccctctgcagcttccctgccaatggtcccagcggctttgcagtggaaggatgggcagggaggctggggtcacagaggcccgaggaccctgcccgagaggcacagctggtcacccaacagggcctttctccctttctcccaaatcagagctgtctccccagataggtggcctctccctgggggaacctggggcagaacagtttccttcttctgggtcctcctatctagtccccgggtcacctgggccagccctgccttgtcccagtggggtctgacagtgtggaggagcaagaagggtgggctctcacacggaaaggtgcagtgaggcctgtggcaggtggaccccatgaccccagcttggcctctggggggttgtctgggctcctacatgtgtgtgtgtgcatgcgtgtgtacatgggtgtgtgtgtgtgtgtgcatgtgtgtgtgcgcacgtgtgtgtgtgtgaccctggctgcaactgagatctgagttgtcttgctggtaagctggggacgggccgcagttcccaggctgggatgagaagcccaaagccctctgtggagccaactctacttgcccccacccctgtcccagcactgaccctcttccctcccctctctgcagttcttcttgacattctcactagaagggtcaccatcactggaggtcctggggtcatctcctgccccaacgcaggctggccccacccccacatgccagctgctcccttctctcctgagcccctgccccccaggactgacccctgcagcccagcccttcccaaacttctgagctcctctgtccgtgggtgcagtggggcccctcggcggggcttcctccctggcctctgtgggatccagcccttctgcctcccagacgcctccccgccccacactctggcttgcaacacttctgttcccgaatgcgctggcctctctttcaccccgagacctctgcacctgcattctgtctggaaaacccccaaccgtcggcacgcatccctggtcaccaccttctaagtcttcagatcttagctgagacgcctcattctccatgaagccctcctggcccagcccagtgggggatggaggtagccctcctcctgtgctgcctatagcaccttttcttcccactgcgcacgggtcacagctgcctgtttactcctctgacttctccgtgtggctgatgccctgtgcctgcagggcccagacgccctcctcctttggtgtgtcctgcatgcctagcccagtgccaggaccacaggactcagtaaacaccagccaggtgactgacaatggagggacatgtggttcgccatcccctgcccctgggaccccccaggcagaagtgtgcacaccccccagggtgtgagacccctgtgcagaaggacatggcgaggattccagaggaacaggggctggcctggcctcagcctctcagagtcaggtctgggggtcctgaagacagccccctccctggccttcttgagagatttgcggctcccctgagcagtgggaggccactgggctggctggagggggccttgcgacataagccccaggtgggctgcctttcacggcgcccccggctccctggcacccgcccaggcgcaggcgctggggtgtgggcacacactcacatgctgagttcagtgtgcggattcctgtaacgctgggctgctggcaggaagtgcgcgccggggaggctgctgctgggaacccagggctggccccgctgagataaagggaggcagcagatcgcagctggagatagcggccctgggtcctggtaaacaggtggggggggtggggggggggaaatgtcctttccatcccatcctcttggccctgagcctgcaggatctatagcgccctagcctaagcccagccccgatagcttgggatccagaggggagttgtcggcactgccatcatcattcccagcctgggggactgggtggcaaaggacagggcgctgggcctgggggcctggctgggcccatggtgggcatgcacttggcccacgtgggggccactgggtgtcaaggtcatgtgtgctgttgggagggtgggaaggggaagggagggagctcctccaagcccctgcacttccccaactgggaccccctagtgggaaagatgtccctctccaggttcgccttcagcaccatctccggaaatccagagtgaggtgccatgagggtgcgagaccgggagagaatggggggtggagtgaggggggcgtgagggctgttccccagccaggtgcagagcaggggggctacagagctggggagaccctgtgcatgacttcaacaggaagccacaggatgttcacctgcactccatcagctcaccgtgggctagcgggagctcggcatggcccatccccagtgcccaacacaatgggcgctcaaatacacttgcttgtttaaaaaattaagaaatttaccacgcatacagaaatgctcatgaagcatatttgtacagtgttatgaataaatacatataaaataaactcccgtgccatagccactcagaccaataaatagtccatggtggggcgtggtggctcacgcctgtaaccccagggctttgggaggccaaggcgggtggatcacctgaagtcaggagttcgagaccagcctggccaacatggagaaaccccgtctctaccaaaaatacaaaaaattacccaggcatggtggtgggcgcttggaatcccagctactcgggaggctgaggcaggagaatcacttgaactcgggaggcagaggttgcagtgagccgagatcgtgccattgcactccagcctgggcgacagagcaagactgtgtctcacacacacacatacacacaaacacaaacacacacacacacaaaagaaatagaccatggccaggattccagaagcttccttcctatttacaacccttccctctgcagaagttactgctgccctgacattcttcttcatatatatatacacatatacatatacatacacatatatgtatacatatatatacacatatatatacacacacacatagatagatagatagatagatgatagatagacagatttgagatggagtctaactatgttacccaggctggtttcgaactcctggactcaagcggtcctcccacctctgcctcccaaatctctgggatcacagatgtgagccaccaggcctggcctggcctgacttttatgaccaggacttgcttttctttatgattttgccaccgtagatgtatcccttaatagcagttgagtgttgagtgtggcctgtgtgtgaactttacagaagtcgaatcagggtgtctccttttatgtctggcttcattaggctgtttgcaagagtcacccgtgctgtggctgtcatttattctctgctgccaggtacttttccactgggtccctagagcatagtttatttctccattctacctgtttagggacatttgggattttgtttccagactggccatgtacggtggtgctggtgggcattcttattcctgtctgctggggcacaggtgcctgcttcgggagggcggacgcctggcggtggggctgctgattctggggtctctcatctgcagctttactaggtgtgccaaatcctttcccaaagtgctggaaatgccctcctcccccactttcccacacttctccatctcggtaacactagtgttatcagacttcttcatcttagctgtccttgtgatatgtggtgatatctcctggcaattttaatctgatcttttttttttttttttctttgatggaatctcactctgtcacccaggctggagtgcagtgacgcaatctcggctcactgcaacctctgtctcccgggttcaagcgattctcctgcctcagcctcccgagtagctgggattacaggtgcccaccaccacgcctggttaatttttgtatttttagtagatgggggtttcaccatgttagccaggctggtcttgaactcttgacctcaggtgatctgcctgcctcggccttccaaagtggtgggattacaggcatgagccaccgtgcctggcctcttttttttttttttttttttttttgaagaaactgagtcttgctctgtcacccaggctgcagtgcagtggtgcaatcatagctcattgcagcctgaactcctgggcttaagcaatccacccccatcagcctcccaaggtgctgggattataggcatgagccaccacactgggccctgctctttctgttaactgctaaaggagagtaccttttattatttatttatttatttatttattttttgagacggagtctcgctctatcgcccaggctggagtgcagtggcgcgatctcggctcactgcaagctccgcctcccaagttcacaccattctcctgcctcagcctcccgagtagctgggaccacaggcgcccgccaccatgcccggctaatttttcttgtatttttagtagagacggggtttcaccgtgttagccaggatggtctcgatctcctgacctcgtgatacacccgtcttggcctcccaaagtgctgggattacaggcgtgagccaccgcgcccagccccttttcttatgttttagccgtttgaattcctctttgtgaagagcatgttctggtcttttctcattgactggtcaggctggttggtatgtgcaagcatactgatccttgcgggttctgtgcgttgcaaagatttcaccccagggctgggtgcagtggctcatgccttcaatcccagcactttgagagtccaaggcgggcggatcacaaggtcagcagttcgagaccagtctggtcaacatagtgaaaccccatatctaccaaaaatacaaaagattatctgggtatggtggtatgtgcctgtaatcccagctacttgggagactgaggcaggagaatcacatgaacccaagagtcagaggttgcagtgagcagagatcgagccattgcgctccagcccgggcaacagtgcgagactccatctcaaaaaaaaaaaaaaaaaaatttccccacagtacagctgcggtggctctcgcctataatcccagcactttgggaggccaagggacggggatcactggaggtcaggagttcgataccagcctggccaacgtggtgaaaccctgtctctactcaaaatacagaaattagccaggcgtggtggcacatgcctgtaatcccagctactggggaggctgaggcaggagaattgcttgaacccaggaggtggaggctgcagtgagctgacatcgagctactgcactccagcctgggtgacagagtgagactctgtcaaaaaaaaaaaaaaaaaaaaaaatttcccccgtgctgtggtttgtctttttttgttgttattgtttgagacaaggtctgactcttttgctcaggttggagtgcagtggtatgatcatagctcactgtagcctcaacctcctgggctcaagcagtcctccggcctcagcctccagagtagcagggacataccaccatgcctggctattttattttatttgcagacatgaggtcttgctatgttgtccaggctggtctcaaactcttgtcctcaagcagtcctcccaacttggcctcccaaagtgctgggattacaggcatgagccactgcagctggctggcttttctttttcttttctttctttttcttcttctttttttttttttttttttttgagatggagtcatgctctgttgcccaggctggagtacagtggtgcgatctcagctcactgcaacctccacctcccaggttcaagcgattctctgcctcagcctccccagtagctgagattacaggcaccgaccaccacacgcagctaatttttgtgtttaatagagaggggatttcaccatgttggccaggctggtcttgaactcctgctctcaagtaatccacccgccttggcctttcaaagtgctgggatgacaggtgtgagccgctgcacccggccccgcttctgtctttagatacggttgcaagctgtggtgtgtgtggacaggggaatggggacttagggattgggctggggggaccctcaggaacccctctactgccttccaggtgtccccagcttgggctgagaccagggcacccccttgtgccttctgcccccacctgctccctcctgggcctaccagcctgcggccgcactggctgctgacagctgggacgctggggtctggcgttatttactgcggcagcttcctcctccttccaggaacttgtcctctaacttggggcggcagcgaggcctctaatctttcggatctcgtttaccggcattggcctctcacttcctgttgctaggcctggaccgaggcacggggtcagctccgtgcactgcgccttgcctgttgccggggcctctgttctggcccctcggcagggaggacagagggtcagatgccgggcctcaggcacagtggccatctggggtagggccagctccacagaggcaggggacccaaggctgagccggctgtgggctctgcttcctggagtccagggtccagcacggggaccaggttattccttcgctcctcctggcttggcagagcgtcatggaaggtggccttccccagactcccccacatcccctcctcccacttctgcagccaccagagccagggcccttgtgggaaaggacagggaagtctcaggagtttgggcacagacaagatccctggagaccgtggggtctgctgccctggagatgtggaatcccaggccttgcccacctcctccaccctgggtgggttccccaaccacccagaggagtgctggcatctcggggccaccagggcatgggcaagagtggctgcccagcccctgccaagggcctgaagccagcgccaggcagaccctgccttgttgagcagtatcttcagtaagggctctgtgtgccgaacacctgctgtgcgccctgcacacttatcccagagatgggattcaaacccaggttgcccagcgcagagaaacagcattctccttctgcatccgtgaaggaagctttgtcttctaaaagccctagcccttctgttaccttgtcctcagccggcctgcttctgtccctgtgccataagccagatgaatttctctcccaggctggccctgcagaggatgagagatggcccttgttagaggcaccctgggcaccccaggcatggctccccagctgatgatagaacaactgagacagacccggcatggtggctcacacctgtaattccagcactttgggaggccgaggcaggcggatcacttgaggtcaggagttcgagaccaccctggctaacatggtgaaaccctgtctctactaaaaatacaaaaaattagccgggcgtggtggcaggcgcctgtagtcccagctactcagaaggctgaggcaggagaatggcgtgaacccgggaggcagagcttgcagtgagccgagatctcaccactgcactccagcctgggtgacagagcgagactctgtctcaaaaaaaaaaaaaaaaaaaaacatctgggatcaggaaacgaggaaaagtatggtcttcatagtggcagagtttgcaggggtctttgggaagaaggaaggttggaacttgaggctgggggatggatcataggggaggggctccatcctagctggggaagggagggctgtcctgctgacattggcctctagaatgggatatgcaggatgacccccctggggcagggaggagaatgttatacttagcatttaaatctcgctctttttaaatgcctatctttcgtgaatgttttataatgcaagtaatgtattcatgcggtcatggaaacttgtaatctaaaaataactatgcatatatcatttttgttggtaagggtgcacgatcaaaatagtgtgaaggtttgaaggtcactttctcctaggtcttattgtttctttaattactttttatttatttatttatttttttggagatggagtcttgctttgtaacccaagctaaagctcactgcatcctcgaactcctgggctcaagagatcctcctgcctcagcctctagggtagctgggacggtaggcgtgtgccaccgcatctggctctaggtcttataatttctgtccttggccacccacctgctgattccaaggtctaggatggcaggatgaaggaaggtcccacatttggggacctgcaggacaggctgcaacagaaaggcctagtttaatgagtagcatgggcgggcctggagaccgagaggtgatgtaggcacgcatggggttcaggcctctctgtggtgagcgcttgcccccgctggaagcagagacaagaccctggctgggtcttctgttttgttttgttttgttttgttttctgagacagagttttgctcttgttgcccaggctggagtgcgatagcgcaatgttggctcactgcagcctctgcctcctgggtggaagtgattctcctgcctcagcgtctcgagtagctggaattacagccacacaccaccacgcctggctaattttgtattttcagtagagatggggtttctctatgttggacaggttcctctcgaactcctgacctcaggtgatccgcccgcctcggcctcccaaagtgctgggattacaggcgtgagccactgctcccggccatgtgccgtctgattaggaacccaagagccccttcctgggaacagaaggacaactggcacctgctgaggcacgcccacttgccgagctgccctgggatccctgggcagagcgtcatcgcttaagaacctaattccacaacaaatatttgtcacgctcctgccagggccctggcaggagcagaggcggtgtgtactgccatgcattcctggtctgttgggtgattgacacatacaagacgccagcggtcctgagagtcaggtgccttcctggaccccttggtgagcggaggtgagttgccatcaaggagggaagattcaggaagataactccaaggtcctcaatccgtccaccagtcagtggatggcaaacataatccatgggcactgattaggtttgccagcccatgctgagtgctgggttcagtgtccttcgtctcctgccaaggggagaggacctcgaatggacgcctgggaccatgatcccattttgctggggaggaaacagattagggaggaagggaaccttggtggtgagcagtaaagccaggattggaacccgcgccgctaaggtctctgcctccctgtaggacccaccctggctgtggggaggcactagcttggggaggagcccctggctggtcctcccaggtgtgtgtggagtcagccaggggcagtgctggcagggcctccaggcactgtccagcctcctcctcttctgcacttggaagaattccagctgtttttcagcctctctcttcctccaggaagccttgcatgatagccctacccctctgccaagacacacaccctcttctccctttttccttggcacctggcttatctcacagttgcctttgtcgtcggccagcgtccctcactgggtttcaggctcatggagggcaagacctgagtctttcattctcaggatccctagcagggggcttagggcataatgagcattcaggaaataactggagaaacgtggatgaggaaacggatagcagagggtggagaggggcttgcttctaaaggcgagacgtgaacctagtgggatgaccaggcagggtgggggtggtggggagttgtggggaggccagtacagaacagctccagggagggcatggagcatggtgtgagcaggaggcctgtctgacctccggggatggccccgtgggacagaggaccttgaaagccaggcagagggatgggatcagatactaacgcccatagggagccctggcaggtccttgagcaggggcatggcagggcaagccttcctttagcccagggtgagcttgcgccaacccgtgctgcagaggagaagggcatggaggatagctactccctctgggtgttcttccggcccggctaccctcagccagagctcaggaatcacactcccctggaacctggagttttggattcaatctttattcaataaatggcttattgggaaccgacagggtggctagagcctgcctggtgttggggttgggggaccctgcctggtggtttgggctctgtgggtgtgtgaggaccactccacggtggtgctggcgttccccattccactctgggctcagcgcccctgacacactccccctgcccactctggaggccaggccccctggtgctgggggaggcactggcttggagaggagcccctggctggtcctcctagaagagagagtctgtggggtgggcctccacagccctgccgggccccacacgggcagctgttcccggaatgggggtttgaaacttttcttttgttggcgaatatgcatgtggtcttaattattaatatgcagcacttatctcccccaaatgttttatcgggattcggcagatccgagtgtgcaggcagtgggtgcgggggcagggcagggatattatgggagcacagggaggccccagaagttggagtgtcctccaaatcagctggatgacccagaggaaggaaagaccctggttaacgatggtcaagttaactctttcaggccctgcccaatgctgcaaaatcgcacctgggtgtttggcctgggtaggcctaccgcgcctttctgggttctggcctatgccgatgtctcccctgccccgcaggaccctggtggactggagggaaggtagggagccgcatctctcagcagcaacccaggacttaaggagggccattgcccttttctggtgggggtgaaggaggaggaagcagcgtgaccttggaatccgtcacctattaacttcccgcgtatcacctgatctcattcggcgtccaccaccccctggaagtgggcttatcgggcccatttttagacgaggaaaccagagtgagacgagtcacagatctgaggacctccagcagagcagggaggtgcccaggtggggggcgggcgggtggtctttcttttggggcagcatcccaaaagaaaggaaaaacagcagggggcgtggctcccctcactgccccgcaaccatccctgcctggccagggccttttgggcagtgccactggagattcctggaagtgccttcgggccacacacacacacatcctccgggaccctcccagccccccactctgcgcttcccgggtttgcaggagggccccaaggccagccgggagccctgcaggacctgggaggaacctgagcctgaagggtctaggagcccgccgtgtctgctctcaagtgccccgcgttcccttggcctgatccccgatcccgtgcaccctgcacccagtaggccctccggggccggggctgaatcagcttcggaggcttcagcaaggcattgcagggggtccctacgggaggtttagtccagggcactcgcagtgttgtgggacgctgggcagggctgatcccagccactgagtcttcccgggcagagagcagacaggggggcattgggatttggaggggcacccgggaacctcctgtcccttccgggccgcctccccttaccctgatttcccttgcagggagggctgtgcaggtttgtggtggggtggggaggacttcctagaatttgttgctttgattggaatcttccctattggggcagggttggggtgagctcttgcccaccctgcccaccccctgccgccagaatcctgggctccctccgttgagttgtgttggggtcggggagcttcgtttatggcatccctgaattcaccccaggctttgaagtcaggctcgctccacaggaaaagctcttccaagagggagattccctggacctcctgggcctccgcctggtaattggcgcttcgattaacagctcgggtgcgaggggcacttcagtggggggcagggcagctgagtcaggggcccagcccaggggagatgttacaggagggaggacgggaagggaggcggggaggttggtaattccagattgaggagggtctccgtagctctccgagtgggtgaggacccctcggaggcaagtgtggggtcccccagggcctgctgggcccccttgggcccctggaacaatgggttcccactagccaacctgttcccacagccagaagttgccatggtgaccccctcccaccttcagctacagcttttccagtaaaaccactgcagaaatccatacttcccgacaggcacgcccggccccccaccccccactctgcgcggtcttggagcctcggggagttaaccctgcgcatgctggtgtctgttgtttgggggagacgggagtgagagccggcaatgcgggccccaggctggagaggagagggtggacgggggcaagacaagctgccctgtccttgaaggccccagcgagtgacttgagcaactccaggaagctggagcggagcagtgaagctagctctgacctaggggcccccttggcacagaggaggcctagctggggcccacagcgcagctcaccccttctagagtgaccccctgcccgcagtcgctgggacacgagacccttcccggcctggctgcagctgctaccctgttagccgatcccctcttcctcctctcccctcccggcacaaacctttttcctggaggcagagagggctcagtcccaggtccccgtggccctgctgccagcacctggcggcccccaagggcactgcgtacctggagcccggctttgcatccacaggtctgccctagggggctgttgaactccagaagtcgctgcctgctcagggtctccgtgtcctccccctgagaagtggggataatgatctgggctgcttccaagcttggggaagaggatccccctagaaggttctgtcctgctgcctctgccaggtggaggggcccctggggacaccccaggctgcaggggctcagggggctccgtggcccaggcccagcctcacttctgcagccagagtgagcaaggagatgctgtaattgttctctctgtagcccaggatgaataattgagaggtctttgaagagaattaattagccagcttattgactggaaacgctttgctgcagatgatggaggatggaagcctgcgtggggcccgtttgccggctggggccgcaccagacattcaattcacacccatggctgctcagcgggaccaggggctcggcctttgcctagtacctgctctctcctgctcaggaggaagtgggggagctgagccccaacttggcaccctgctgtggttctgtcctgatttctggtatggggagggggggcagcaccccttagactcaactctgctctgtcttctaagaggcaagatgggggcctctccaggagtgggggtgggtgtggctcagtcttgggagcagttcccttgcaggatagactctggtcctgggctccttcagtccagcccaccccaccgcctgagccccagccccttttcgggaactagggagtgacaggaaaagacgaaagcgttcttgcctgcaggctgcagggggtcagacatgtcgatgtccctggtgaggctgaggagggccggttctcatggaatggacaaggcgctaggcaggaaatgctggatcactagccccgggtaccagtcattaatagtagtagtaaacattcctccagcaggccctgtcctaagcacactgcatgcactaactcctgtagaccctgtgaagacagggggtgggcttgttccccagctgggtctgcagagcctcagggcagaacctggcacagataaagctttgttgattgaatgaatgagtgaatgaaggaaatgaatgtgaggaagctgagtggcaaagttagactcacacatcgggtttgtttgtttgtttttttgagatagaatctctctcagttgcccaggctggagtgcaatggcgcaatcttggctcactgcaacctctgcctcccaggttcaagcgattctcctgccttagcctcccgagtagctgggattacaggcatgtgccaccacacctggctaatttttgtatttttagtagagatgggatttcaccatgttggccaggctggtcttaagctcctgacctcaggtgatccactcacctcggcctcccaaagtgctgggattacaggcgtgagccaccgtgcccggcctcacacaccgtttttaagctggctcaaggatccgtgctctgatgcatcctccagtcccaggcgacgtcaacatggaagatgtgggcaagaggcaaacagtcatgaagggcttgggccatgtggaggatgagcaggaggtgggggccctgagagcgggcccagggttcagccctgcctctgcagctgctggagcaccagtgaagagagggcaggtgccagcaggcatggtgcaactgtgggggacatgggcggggcagggggtacctgggtggagctggttggggaccattgctcttggtccagataaggcatgacaaggcctgggccaagacccctgaaatggggcatggagagtctgtgacagctctgagatatgtggaggggaaggggaatggaacctggtgacttgtggacctgcggaatgggggacaggagttgagatgactccaggtatctcccgacatgagcacatgtatctgcaaatgaggcgggggtcaggaagcacagggagcttgctcttgccccgggggcctaggatgccctgggctgtcatcattccacactcacccctgacctgctcctgctcgctcagggaggctgccttacagggaggtatcagtggctccctcatcctctgcctctgtggagcccacagtgggaggcacctgcagaacatgggggtgggggacagtgcagttgggggcgtgggtgttccttcctctatctgcctccctcacagagttgtgatcaagcgagttgtagagaaacgccactctctgagacgaattcaggctagtgctcaaaattctctccaccccaaagaaggggctagattttcttttatactttgttttagaaaggggcggtggggggagtctagttaaaacaatcttacagaagcaaagcagacaaaaaagttaaaaggataaatggttacgggaaagcaaacagttccaggtgcaggggctttaaatgtattacaaggtgatagacgcggggctttgagtgttatcaaccggatacaaacgcggggactctgggtgctatcaaccgggcgaattcctaggaactgcggatataacttgccacagtatcttatcagttaattgcatccttggatgtgctggcagtctgcttgcacaagttaagtccttgaggaagggggtgggtaaggggctgtaagtgaaggagccaagatggagtctgtctggctctctcagctaagggagagtcaattcaggttaaaacaaggttgggtatcacaatagccctctccatgcctctctgtccagggctgggattggttggcatactctgcatgcctttccccagccctccagctgtcctagagttgggctgggataaccctccagccgccctgtgagttgcactgggatcagtcaggtgtactctgcatgcctcaccccagcccccgagccgtcccgtgggttggagttgtttgcgtcactggctttctgttctcagctgacttagctgggacgtcaacaactccctatgtcagaggcaagtctccgcctgcatctgccagagctccacacagctgcagacacctgtggcttcatctgagtcctcatctcggcctctgggaaccactccttcctaccctttgcctggagacagtggaagccgagggacatttctccgaatggcgttcacttggctccagaaatgagaactggaatgaggaagaggaatcagtctccctccaggtggctgaagctaggcacgtggaacctgggagcagcgggcagccacactggtgcccttcagacagcaggagggggctcttgtccgaagctctgagttcaaaacagaggggacatgggggaacagcaggaggtaggatcaggccccccaactcctgccgagagctcacacctgtcttcagcccctcctgcattcctgccagtggtagccatttgcccttttggttgcctggtgtccaaataccctttctacgttggaggtagggtcctgggggtccctgctccctttcccaggctctgaaaactgactcctgggaatgtgaccaaaatgattacattaaatgcttccacctgaatgtttaatcgtgaagatgagatgccaagttcaagagtaatttaggggccaggtgtggtggcttgcgcctgtaaccccagcattttgggaggccgaggcaggtggatcactggagaccaggagtttgagacaagcctggccaatatggtgaaaccctgtgtctactaaaaatgcaaaaattagtcaggtgtggtggtgcacacctataatcccagctactcgggaggctgagacaggagaatcgcttgaacctgggaggtggaggttgcagtgagccaagatcaggtcactgcactccagcctgggcgacacagcaagactctgtctcaaaaaaaaataaaaaataaaaaaagagtaatttaggattgttcccaagggttgtggtagagccagacagcactgtgtcacagcatgcagtgagtatccagcctcgataccctatgcagcccattctatgctaacggttacccccactgaattccttttctgcataggttaaccagagtgccactgtcagtcacaatactgactagtggcttctcttgggtttcctgagaaactccctatatcagttagtgagtgccataatcaggctgtgtaacaagcagccccgcaatcctggtggcattctacaataagcatttgttttgctcacatctctgtgggtctgtgggggttcaccagatccaggcttggattagctggctggcgtctgggctgtgagttgggtccaggtttgcttcacatgtttcttatcaacctcggcccagcaagctacctgaggcgtgttccttccagggtgacttcagcagtgaaagagagcaagttcattgtgcaagcacagttcaagtctactcactccatatcccctgacatcccactgatcaaagcaagtcccatagctatgccccaagtcaaggatgtgaatgcataattctactacaagggagtgaagaagcaggactgatcattccatcctccccttatttgtttttagtttttattatgaaaaaaaaaatttttttttgagaccgagtcttgttctgtcgcccaggctggctgaagtgcagtggtgtgatctcagctcactgcaacctccacctctcgggtttaagcaattctcttgcttcagcccccccgagtagctgggactacaggcttctgccaccacgcccagctaatttttgtatttttagtagatacggggttttgccatgttggctaggctggtctcaaactcctggactcaggtgatctgcccacctcggcctcctaaagtgctgggattatgggcgtaagccactgcaccaggaccatgaaaatatttttttaaaaataggcagaaggggccgggcacggtggctcacgcctgtaatcccagcactttgggaggcagaggcaggtagatcacgaggtcaggagatcgagaccatcctggctaacatggtgaaaccccatctctactaaaaatacaaaaaaaattagccgggtttggtggcgggcgcctgtagtcccagctactcgagaggctgaggcaggagaatggcgtgaacccaggaggcagagcttgcagtgagccgagatagcgccactgcactccagcctgggcgacagagcgagactccatctcaaaaaaataaataagtaaaaataaataaaaataggcagaagggtgtaatgaatccccatagaacatcacccagattccacaattattattattttcccatatttgtctaacctgttttttttcccttggtaaagtgtattttttaaacttttttttcccatatgtaaaacaaataatttatgtaaagatatatgtatatatacacacataacaaaatttaccattttaaccattttcaagtgtacagttcagtggcattaagtaattaccactgttgcacagttgctctccagctcctgaacattctaatcttcccaaactgaaactgtccccattaattaacactagctccccattcccctggaccccaacccctggcaaccaccatgctattttctgtctctataaatctaacaatctcacatgagtggaatcacacggtatgtgtctttgtgtgactggctgatttcatttagtgtgatgtcttcaaggtgcatccacgtgatagcataggtcagaatttccttcctttttaaggctgaataatattccaccgtatggatagaccatagtttgtttatccattcatgcatccatggatactagggttgcttctatcttctggctattgcaaatgaataatgctgctatgaacgtgggtgaacatatctctgagtctctgcttttaattcttttggggatagatacaggagtggaagtgctgggttatacgctaattctatgtttaatttttggagcatctcaccacactgttttccacagcaattgtaccattttccattcccaccaaaattgagtgcacagggccaagcgctgtggctcacacctgtaatcccagcactttgggaggccatggcgggtggatcacttgaggtcaggagtttgagaccggcctggccaacatggtgaaaccccgtctctactaaaaatataaaaattagtcgggccatggtgaagcatgcctgtaatcccagctactcaggaggctgaggcacgagaatcgcttgaatccaggaggtggaggttgtggtgggccgagatagtgccactgcactccagcctggatgacagtgagactccacctcaaaaaaaaaaattgagtgcacaggattccaatttctccacatcttcaccaacacttgttattttctgttgttttttttttaaaaaaaatagtagccgtcctaataggtattgagtggcgtcgtcttgtggttttagtttgcatttcaggctccatttgacttcggctggtttgaggtgagtttctgtttcttgtaactggcgctagttcaggtaggctcagcagctgcagaactcaaagagatatgttcacccgcgttcatagcagcattattcatttgcaatagccaaaagatagaagcaaccctagtgtccatggatacatgaatggataaacaaactatggtctatccatactgtggaatattattcagccttaacaaaggaaggaaattctgacctatgctatcatgtggatgaaccttggagacatcacactaagtgaaatcagccagtcacacaaagacacataccagctcagcagctgcagcacggtagccaacaatagcagctgtggcttgtggagaagtttatttctccttctgtaacagcccagggcgggtgcacccggtctatgcagccctactcccttaggggacccaggcggatgctgctttgctaccttgacgtggagtttctgagctcgctctgccggttgccacctgggtccccaggtgggagggtggagcacctgccaggattgatgggctaagggcggaactttccccttgcattccatcaggggtatttatctttttttttttttttttttttttgagatggagtcttgctctgtcacccaggctggagtgcagtggtgcgatctcggctcactgcaacctccgcctcccaggttcaagcaattctcctgcctcagcctcctgagtagctgggattacaggtgccaccatgcccagctaattttgttatttttagtagagacggggttttgccatgttggccaggctggtctcaaactcctgacctcaggtgatccgcccacctcggcctcccaaagtgctgggattacaggaatgagccaccgcacccggtctcagttgatatttctaagaatctgcatagaatagaccagccgaccctggatcctatcagagggtggaggctgggaggaggaagaggatcaggaaaaataactaatgcgtactagacttagtacctgcgtgctgaaataatctgtacaacaaaccccaatgtcacgggcttacctatataacaaacctgcacgtggacccctgaacttaaaaggtttttttaaaaaaagagggtcgggtacagtggctcacacctgtaatcccagcactttgggaggccaaggtgggtggatcatctgaggtcaggagttccagaccagtctggccaacatggtggaaccctgtcgtctctactaaaaatacaaaaattagccgggcatggtggtgggcgtaatcccatctactcgggagactgaggcaggagaattgcttgaacctgggaggcggaggttgcagtcagccgagatcacaccactgcactccagcctgggcgacagggcaagactctgtctccaaaaaaaaaaaaaaaggggaagcctgttgcccaaaagggctgctgtggtacctaaaaatgtgggctttctccttctgggagggggtaggaagaagtcgcccccactctccaggcccacggctgccccgcccctgctcaccagccggctggctgtggcaaaactaaagcctgccccgtgccctgagcccggcatgttgttcagcctctctgaaatggtctccttggatcatgggcagagatggtacgatgggatcccacccgaggggtcccggccggtgctcacggggctgggaccagctgctcttactctgtttttctacctttctcagccacttggaggaagagagaattttgttaccttttacaggtaaggacgctgaggttcacaggataagtcacttccagccaggtgtgtgtgacctcagatccatactcagagggaggtgggctgggcagagcctcccacctgctcccctggaggcccatgagtctgggcactggggccccaattcctataaaccggggttgattacggaggactcccctcacctgcaaccccgcctcccaccacagagcccaggcagcagggaagcctggagacaggcgcagagcctctgggcctgggtgcctacccctgcccacccccagggcctcaggccacaggagaccacctaaagcaggagccgggagtagggcccaggctgggctggcacagctgggcctgtgaggggtggaggggccgctggggaagggacttaccagcagcagctctgctgggacctgggaggctctcctcatttccagtaacaagcgggggtgggggcagtgggagggaggaggcggctttccccaggtgccagctgtgcttgaagacagcctgtcccctctgctgtctcctgttctcagctccttaatcccctccccgacctcgtagttgactcctgggctgactcctcccctggaagggaaagaagagccgggctcacccacacccaacaggtgcagcagctgcttgaggtcacagttgctgagaagggaagctgaggccagtggcagctccagccagggttggtgcagcctgctgaggggtcgaggtcacccaatcacccacccagctccacctgcccccacccctcccacccagcctggccaccagcccagacaccttcctcacatggcctgaagacccctgctgacctgtggcaccatgtggcccagcagggtggccaggctggccggggtcatggggtgggggacgctgctccccacctgccctggggtggtcggtgctgttggggaggccactctctaggggcatctgccaggtaggcagaccagaaacttaccccgagttctgtgacccgctccggggagcggggcatctcatgtcctctcagccacgtctgaaagctgggacatggcagagtgggcagggctgccctctgagctgacccccttcccctcctccccatcttgtctctcctcagatctagggctcactctgaggcgtgggtgacacttgccccccaaccccagcctcttcagtgcagggaggcagggcctgaacttcggagggccttggggcaggttcctggggcttgcagtgaggcctcccctttcccagggagaggaagggagaagccgcgtctggcgagggaagcctgtaccctcaccctcactgtgtccagatctgcacccctaacctggcctggggagactggcaccaggtggagctggtccccaaggagccccaaaccccagaacatctgctgcaggggtcagctctcagggggccccagggccagtcctctctgcaccccaccttccctgctcaatgtggcttgtaggaggttatgcaaagcattatgcaaagcacatgcaaatgagacccaaccacaactggtcactctctccaggcaagaccactgaagccctctggtcatcagcaggaatgcaggggcgcctatggcaggccggactccaggtcaggccttggggcagtgaggaagaaggtgcatgccaggtaagctatagtcaaaagggagggacacacaccaccaggcgaatgaatgaagcaaatcaatggcactcctccctgccccagaattcaaaatgacagaccggtgcagacagatgcatgtgtgttctgagaggtggttgtgtacaagcaagctcactccttcagtctcccattcattcacttattctgcaaactcggtgtctattatgagcctgggctgttccaggggctggggatatcccagcagatgaaaatgcctgctttgcagggctccagtagggagagaaagatacaggtgacaagtcaggatgagcaaggaggacacaccggtgtatgttccagaaaccataaggaggctggagccaggcacagggagccctgggccttgggaagagtatggtctgtgcaggggccatgtagtgggagggggccctgcaacatcaacccaggtgccctggggaggttgtggtggaaacaggcagagcacggagggaaccaagttccccgggcaggagatgccaggggctgcggccaggggtggcagtggaagggctgagaagtggtcggattctgggttaggaagagaaagctgccctttgccctctgaagcttcgccgaaaaatcagcggacaaaaggcagattcataggagaaaaggctcacaaaatttactgtaactgcatagcacaggactccccggacgtgattacccagtaatccagaggggtccagaacctgccatgcccttcctcatgggagaagaggtggtgggaaaccacctctttgaggcaaagtcaatgatttttggggggaaatgaaatgaatgggccccttgctcagacaatggttagtgaataattctctttgggaatcaaataggaccaaagaacagacaatggtttgggaggaagttggtctgggctctaggtgtggtggttcattgcagcctcttcctttgtgatgtgagttttaatcttctccggttaataacatttcagggaaggcaattgtgttcctcttggccagtctggtttctaggtagttaaggaaagtccgagaacagcctcatcctgtgctttgggaagacatggggctggaggtaggtcagagagaccttggggccccttcttgtcaaggcgccatattttctgagccccaacagtgtattttgggaatgctgttatatttccatctaatttgcattaaggaaaagctatatgtgttttggtgcctgggtacctgtgttggggaggctgggagtggggacagagtgggggagggcatcttctgggtgctctgcagacccaggggtctgtggtgttctccttcagggcaaccccccaaaacccaccacccaaactcagcgaaactacaaggtggggctgtgatggggcctagaggtttatgtaacaatcatgggaacggaggtcctcacccgtggaggccccgctaggggttgagcctattccaggggttccctggagttcacctctcctcactgcctcctgttcttattggttttctggtgggggaggaaggggcaaagccgctcttctgtgaaggtggatgttttttttttggcagcagctgaaatccatttgctactaggcctaggagtaagtgggcgatcaaaactgaatcgtgcagtttttactccaaaacaagccctggctctttaagacttggggctgattttcactctcgggtacctggggcgaaggtcgggaagccaggccttctgtaaagcttttaaggacagaaggtgtagcctcccaagttagcacactctggagccccgaatgcagttgccctctacagacctggtcagggcctcaccctgcagcccaggggaagggactgggggctttaaagctctcgcaggtctctgtttggctgtgtggcccaggaccagctccttctactctcctgctgtgaatcagcagcaccacccccgacttagtagcatagtgtgaggctgacgtgcacgtgggtgtgaatcccggtcagcgccactcgttgtgcctttgcgcttcaatggtccctgccaaggctgtggcagcagctcctgagctccccaccatacctcgcctaaagccttagggacaagttcagccacctgagaccaaaagcgccctgcctggctagctctaagcctccaaataacccctgggatcccagcagttcttcactgtaagagtttacttgtggctgggcatggtggtgaacacctgtagtcccagctgcttgggaggctgaggtgggaggatcacttgagcccaggaggttgagatggtagtgaaccatgactgcaccactgtactgtatgtaacctgggtgacagagtgagtgagaccctgtctcaaaaaaaaaaaaaaaaaaaagtgggccgggagcagtggctcactcctgtaatcccagcactttgggaggccaaggcggacggatcatgaggtcaaggtatcgagatcaggccgggcacggtggttcacacctgtaatcccagcacttcgggaggccaaggcaggcggatcacgaggtcaggagatcgagaccatcctgcctaacatggtgaaaccccgtctctactaaaaaaaaaaaaaaaatacaaaaaattagccgggcatggtgatggatgcctgtagtcccagctactcgggaggctgaggcaggagaatggtgtgaacccgggaggtggagcttgcagtgagccgagattgcgacactgcactccagcctgggcgacacagcgagactccgtttcaaaaaaaaaaaaaagatatcgagatcatcctggccaacatgatgaaaccccatctccactaaaaatacaaaaattagctgggtgtggtggctactccggaggctgaggcagaaaaatcgcttgaacccaggaggcagaggttgcagtgagctgagactgcgccactgcactccagcctggtgacagagcgagcctccgtctcaaaaaaaaaaaaaaacagaacaaaacaaaaaaagtgttcacagatgggcttggaggtccatggtccatccttgttcttcaggccagccaaaggtggccaaatttagtaaaaaagcaaacaaaaaaccaagacacctagttaaatttgaatttcagagaaataacaaatacatttttagtgtaagtatatcccatgcaatatgagagagatacttactctaaaaaatgtatttggccaggcgtgtgggctcacacctgtaatcccagcactttgggaggctgaggtgggtggatcacttgaggtcaggagttcgagaccagcctggccaacatggcaaaaacccatctctactaatacaaaaattagccgggcctggtggcgagcacctgtaatcccagctaccagagggctgaggcatgagaattgcttgaacccaggaggtggaggttgcagtgagccaagatcatgtcactgcactccagcttgagtgacagagtgagactgtgcctcaaaaataaaaaaaaatgtatttgttgtttctctgaaattcaaatttaactgagcatcctgtgttttatctggcaatcctagtcccaccctcttccaaattcacatctttttttttttgagacagagtttcactcttaatgcccaggctggattgcagtggcatgatcccaggtcacagcaacctctgtctcttgggttcaagcaattctcctgcctcagcctcccgcgtagctgccgtgcaccaccacgcctggctaatttttgtatttttagtacaacggggtttcaccatgttggctgggctagtctcgaactcctgacctcaggtgatccacctgcctcggcctcccaaagtgctgggattacaggcgtgagccaccacgcccggccctccaaattcacgtctataagaacgattttcctgccccaaccatacatttctcacagataaaggtgcatttttatcatttcgtctttcctggggctgaaatggcttcttctttttgcattttatggttttacaattgtagcagtaaaacattcttgccggcaagatgattgaaaatttaactacaaaaggcatcattcattttatttttgtcttcattggagacataaaatggattcgcaatcatcccaccacagtggttgagtattgtgggttttagagttgctcacatagcacatttatactcaccagtgtgagggctctttgcagccgccaatggagtgatcgtttgtgttttggaagcagcagtaacatttattcctaataatcctgctgcagtgggttcttggtattttatagttgttattgcagtaaaatttatatcctacagaattatgacaatattcagctactaatatgattattatttgtgtgtgtgtgttaaaaccacggaaataaaatttactcccaacaatacagtggcaattttatgtccctaaacctgaccgtaaataataaacataactacagaatgcctgtaaacacataaaacatccttctcggaaaaagtgaactctccattgctatcctgatgagaccagcagctggggagcctggtctagcagttagggctcctgggcagacttcaaaaggatgaagcaacttcttcacaggactcctggagagcaagttgcttaacatttcagagtccaagtcagcccgtctcagagaacgtgggctggtccatcgcctgatgagtgcacggatacaatgtgtggtaaccacactgtagaacactgcttggccgtaaagagaatgcagttctcatacacactgcaactcggatgagccttcgagacattatgctccacgaaagaagccagatacagccaggtgcggtggctcactcctgtaatcccagcactttgggaggccgaggcgggcagatcacaaggtcaggagttcaagaccagcctggccaacatggtgaaaccctgtctctactaaaaatacaaaattagctgggcatggtggcgcatgcctgtaatcccagctactggggaggccgagacaggagaatcgtttgaagccaggaggcagaggttttggtgagtcaatatcgtgccactgcactccagcctgggcaacagagcgagactccatctcaaaaaataaaagtaaaaaaagccagacacaaacgatgtatacttttgatccacatactgtatgatcccattgaaattaaatagccagaaaaaggctaggtgtggtggttcacacctgttatcccagtactttgggaggctgaggtgggagggtcgcttgagctcaggagtttgaggccagcctgggtaacatagcaagacccccatctctacaaataacttaaaaattaggcaggcatggtggtgtgcacctgtagtcctggctacttgggaggctgaggcaggaggatcccttgaacccaagaggttgaggctgcagtgagccatgatcatgctgttgcactccagcctagacaacagagtgagaccctgtccgaaaaaacaaaaacaaaaacaaaaattaaaaatatctagaaaaagtaaatttccatagacagaaagtagacgagtggttgtcaggggctgggggagggaaggggaaatgggaagtgaccgctcatggatcctttttttttttttttttttttttttgagacagagtcttgctctgtcacccaggctggagtgcagtggtgcaatctcggctcactgcaacttccgcctcctgggttcaagcgattctcctgcctcagcctcctgagtagctgggattacaggcatgcggcaccatgcccagctaattttgtatttttttagtagagacggggtttcaccatgttggtcaggctggtctcgaactcctgacctcaggtgatctgcctgccttggcctcccaaagtgctgggattagaggtgtgagccactgcgcccggcctcatggacacttttgagatgatgaaaatgttctggtagggctgggcagggtggctcatgcctgcaatcccagcactttaggaggccaaggttggcggatcacctgaggtcaggagttcgagaccagcctcaacatgaagaaaccccgtctctactaaaaatacaaaattagccgggtgtggtggtgcatgcctgtaatcccagctactcgggaggctgaggcaggagaatcacttgaacctgggaggcggaggttgcggtgagccgagatcgcaccattgcattccagcctgggcaataacagcgaaactccgtctaaaaaaaaaaagagagagaaaataaaaagaaaatgttctgtggttgactacagtgatggttgcacaattccatgaattcaccagaagctgttgagtgtatactttcaatgggtgaatagtgtggtgtttaaacgctcttaataaagttgctaaggccgggcacggtggctcacgcctgtaatcccagcgctttgggaggccaaggcaggcggatcaccaggtcaggagtttgagaccagcctggccaacatggtgaaaccccgtctctactaaagatacaaaaaaaaaaaaaaaaaaaaaattagccgggcgtggtggcacacgcctgtaatccgagctacttgggaggctgaggcaggagaatcgcttgaacctgggaagcagaggttgcagtgagccaatatcgcaccattgcactccagcctgggcaacagggcgagactctatctcaaaaataaataaataaataaataaataataaataaagctgctaaaatgaaaaaaggaagaaaacatgcttctgttcctcctgccccccacccctgcctcccctgggctttcagctgctgtctctagagaatgtttggaacaggtgtctgggaatagctaacaaaatccctctggcttctccttgccttgtgggttatggatactgcccccttcctccatcgtgaaatgaaaagtgacatgaccctaaaatctaaaaggaccataaggcccattaggcaatctcaagagagccacctgcaagggacagaggtgtggcagcagccctggagagaaggaggccaagcagagagggtgcaggctgccaggatggagcctctgcccgccactcactgggcagcagtggagctgcctctgcctgtatcatccccattttatgaatggggaagctgaggcagaagcagtgatacagccagaatgaacagtcttaggcatcgtccacagaccagcgagttactccaccaggtgtctgtatcacccaaagaacctgaagtgcatgggctccttgcgagcttttttctctcaaaaaaaaattgtggggctgggcgccgtggctcacacctgtagtcccagtactttgggaggccaaggcgggtggatcacttgagttcaggagttcaagaccagcctgggcaacatggcaaaaccccgtctctactaaacacacagacagtttggctgtagtggcgcatgcctgtagtcccagctacttgggggactgaggtgggagaatcgcttgagcccaggaggcggaggttgtaggtgagccgagatggtgccactgcactccagcctgggcgacagagtgagatcctgtctcaaaaaaactgtggtaaaataggccgggggtggtggcttacgcctgtaatcccaccactttgggaggccaaggtgggtggcaccggaggtcaagagtttgaggccagcctggccaacatggttaaaccccttctctactaaaaataccagcgttagctgggtgtggtggtgcgcacctatagtcccagctactcggggggctgaggcaggagaatcgctagaacccaggaggtggaggttgcagtgagccgagatcacatcactgcactccagcatgggtggcagagtgagactctgtctcaaaaaaaaaaaaaaaatttgtggtaaaaaacacatagcataaaatttgccactttagcctttttttttttttttagacagagtctcgctctgtcgcccaggctggagtgcagcagcacgatctcggctcactgcaagctccgcctcccaggttcacaccattctcctgcctcagcctcctgagtagctgggaccacaagtgcccgccaccgtgcctggctaattttttgtatttttagtagagatggggtttcaccatgtcagccaggatggtctcaatctcctgacctcatgatccacctgcctcggcctcccaaagtgctgggattacaggcgtaagccaccgcgcccagccaactttagccatttttaagtgtttcaattcagtggcagtaagtatcttcacatcgttgtgtgaccaagtgtcagaggtgacgtgggctgtccaggacacatgactggtgggaactacagggtccccgtcctggtcctcacaccgctgttggccctggacaaggtatgtcttctgagtgcgaccagaggcccagagagcacgggattggctgcggttgccagtgcctggggcagttcccgctaatgccatcgtcctggggatccccttgagtcccctgctcctgcttcttagtttgctgcaccccagagggtgactgggacccccatgcctgggacactggttgcataggcagcttccagggccaccccagacctcccagctcagagtcctggggcctggggctgtgagttaatcagtgtccaggcaaccagggatgccacaagaagtcaggaagtttccagacttgcctggtctcagaattatctaagctcctttttttatttttttttttttaagacagggtctcgctctgttgcccaggctggagtgcagtggtgggattttggctcactgcagtctcaacctccagggttcaagtgattctttcacctcagcctcccaagtagctaggaccacaggcgtgtaccaccatgccccagctaagtttttaaatattttgctgagacagatcttgccatgttgcccaggctggtcttgaacttctgggctcaagcgatcctcccaacttggcctcccaaagagctgggattacaggtgtgagccactgcgcccggcccatctgagctacttttagaagtataggttctctggcttctctccagctgagaccaaaccacctctgaatctattgttaagaggtacaaggggcttgtgatacaaaagtggcaaagctggacaggcacagtggctcatgcctgtaatcctagcactttgggaggttgaggtgggccgatcacttgaggtcagaagttcaaggccagtctggccaacatggtgaaaccctgtctctgctaaaaatacaaaaattagcctggcatggtggtgcgtgcctgtagtcccagctactcgggaggctgggacaggagaatcacttgaacctgggaggcggaggttgcagtgagctgagatcatgctgctgcactccagcctgggcaacagaacaagactctgtctcaaaacaaaacaaaacaaaaacaaaaacaaacctgcaaggctgtcggttcatgcgctcattccttcactcattactgcagtcctactctgtgtattcattattgcagtcctactgtgtgtgcctcacctctgcagccggatcctgccccagccccaggcatgaaggcatggagcccctgcctgtgcacgtccttcttcctgggctaccctgcctctccccttgtgcctgacattgagggctgtgagacctcctactcgtcacccctcagccagctctgtttggccccccaaaagccttgggacctcctcgggtcctggacgtgggactggctctgattctagcctctgggctgggctgctgctgacaagtgttcagctcctgctgctcagatgaatgaagggacagaaggcgggtgtctaggcatggccgggacctgggattctattttttttttttttttttgagatggagtttcgcttttgtcgcccaggctggagtgcagtggtgcgatcttggcttactgcaacctctgcttccagggttcaagcgattcttctgcctcagtctccctagtagttgggattacaggcgtgcaccaccaagcccagctaattttgtatttttagtagagacggggtttctccacgttggtcaggctggtctcaaactcccgacctcagatgatccgcctgcctcggcctcccaaagtgctgggattacaggtgtgagccaccatgcccaaccccccagccaggacgggaacttcttaggatccggctgcagcccagggcagaggagttcccgcggcttcctccagtgagttaagtcaggcctgagtgagcatctactctttctgggccgctagagggagaccttcgcagcctcgtacttggctcaagacaccaggctaaggggtgtcagtgtgtgtgagtgtatgtgtgtgtgtgagtatgtgttttgtgtgtgtgtgagtggcgtgtgtgtgttgagtgtgagtgtgtgaatgagtgtgtgtgtgttttgtgtgtgagtgcgagtgtgtttgtgtgttgagtgtaagtgtgaatgagtgtgtgtgttgtgtgtgtaagtgcgagtgtaagtgtgtgtgagagagagtgtgtgtgtcctacctgggcatgcacgggtgggtgtgggcagtgacctgagccctgcacgtactgccaggtggcccggcttgccaaaggtggggaagggttatttacccaaagtgggagagacctgcaggctgggcggcagcggcaggaagaacagcgagcgaggccacagtggcatccatggaagatgttatttggggccttttccgtgcctgctactgttcttcgcatcctgcgtgtatcacgagaagcaatcctatcaaaggaggacctatgaatacaatatccactttacagaggaagaaactgaggctcagagaggctgagtcacttccagagctgagatttgaacccagggagtgggggctggggcctgggctccacagcacaaaggagccctgcctgctgggacaaggagctgccttgtggtatggccagtgtgcccaagccagcctttggagcccgctgggctggctctgggttccagctctgccgcctgcctgctgagtgtccttgggaaagtccctccacctccctgagccccgctttctcctctgtaagatgggactaatgacacctatttctctggttgtttagaggtttaatggttcactgtatgcagagggaggcagacttcagggcctcctcaggagccttggcatgcggccacagggcctttgtatgtactgtgtgtgcgcctaagatgcccattagaaagataagatgccacctcactgcggactccccttaatctccctgctgcagggccagctccaggggtgtgtgacctatggaggtgcactggtccccatgctcagagcacgctgtgctgggtttaatgatctccgtcaccatttcgaaattcttagtgattttttaacaaggagccctgcatcttcattttgcactgggccctgccagtgtcacagctgggcctgccctgcagtttctttttctttctttcttttttttttgagatggagtctcgcttttgttgcccaggctggagtgcaatggcatgatcttggctcactgcagcctccatctcctgggctcaagtgattctcctgcctcagcctcccaagtagctgggattacaggcgcccaccaccacgcccagctaatttttgtatttttagtagagatggggtttcaccatgttggccaggctggtctcaaactcctgacctcaggtgatccgcccacctcagcctcccaaagtgcagggattacaggcgtgagccatggtgcccggctgccctgcagtttctcctcctgcgccgtgccccgcatgatctgcccccagcgaggaaggagactgaagagcagcagggagggtccctggagacagagcgggcagagtgggctcgacgcacccctgacacccatcagcaggcgccttcctcaatgcggacaggcagaccctcctctcttgggcacacactcagtcagcccctgggtcagttgctcctcctaaaatgggactgacagttgaagacctccaagcttcccagtcatagcagtggcccctctcagcccacacccagtccactctggattgctagtggggatcccccgagacagggttctcccccaggctggtcagccccacatctgtgaagctttctgggcctctccacacccccagttctctgaggcaggcggggtctccagggcaaactcgtgtgagcctcacctgtgtgttgcaccgtcctgtctgcaaacagaaaccctcacgctgccgagccgatgcctctgtccccagcacctccttggggacggtggactccatggtcaaagggccaactcaggggagccacagtatctgtgcttcaggcagcccgagttgaggacgtgtggcattctgctggcatcgttcatgcctcactcttggctctggggctgggcacttgctttctggcccagcctgccgccagggtgaatggcctctggggcagatggcgttctgggaacaggtaatgtcctggccagcgggcaggccggagctggagcctgggtggagggctccccaaggaccaccctgggtcccactcggctttccctgcgtgggggcgacactgttgccagttacagaccgcccaagagtgccccgagatctaagcataggacacaacaggggctggtctcatccacctcggatccacccacctgcagcccagtccggctgtgtccctcaggtcacactcactgtgttttgagaactctcctccgggcctacaaagtttgccaaggcgaatgtcaaagggatatgggggcaacagctcccaagatcagccctaatccaccctcctcatctgccctctccatggggcctcactccatgtctccaacatctcaggttggtgtccaagccacggcctcacatggactcacctcctgcttcagtctctgtttctgaccaggcttcttgctcccagggaggagcgagcttggaccgctgctctcagaagggaccctcctagctggacctgcccctgatttggccgggtgccctgggctctgtgcccatctccaccaacctcccagaagcgagagctggatacctgcctctctgtgtccagcttccttccttccttcctcaacaatcagttattaaacacccaggatacagatgcacggtgctgctgcagctgtcctccaggctgcctttttttttttttttttttttttgagacaaagtctcactctgtcgctcaggctggagtgcagtggcacgatcacagctcactacaacctcaaccttctgggctcaggtgatcctcctacctcaacctcccaactaactgggaccacaggtgcatgccaccatgcctggcttgtattttgtgtagagatgaagttttgccatgttgccgaggctgatctcgaactcctgggctcaagtgatccacccacctcggcctcccaaagtgctgggatttcaggcgtgagccaccgtgactggccccatgctcttggcttctaatcatagactttggggctcattcagatcacctctcatagtgaacttttgtcactttcttctccaccatccactttaccccagggatgagccttcattggtctaagccagtctgactctctcacccccttggttataacgatataggatacatgtcccaacccgggtcagatggccctataaataggtttcagttgctttacctacaagtagttccttttttttttgagatggagtcttgctttgtcacccaggctggagtgcagtggcacgaccttggctcactgcaacctccgcctcccaggttcaagtgattctccagcctcagcctcccaagtagctgcaattacaggcgcacaccaccacgcccagctaattttttttttttttttttgagacggagtctggctctgtcccccaggctggagtgcagtggcacaatctcggctcactgcaagctccacctcccgggttcacgccattctccagcctcagcctcccgagtagctgggactacaggcgcccgccaccacgcctggctaattttttagtatttttagtagagatggggtttcaccatgttggccaggatggtctcgatctcctgagctcgtgatctgccctcctcggcctcccaaagtgctgggattacaggcgtgagccaccgtgcccggcctacacccagctaatttttgtatttttagtagagatggggtttcaccatgttggccaggctggtcttgaacccctgacctccgctgatccacccacctaggcctgccaatgtgctgtgattacgggcgtgagccactgcacccggccaagtagttccctttctgttgcattgggacctagaggcacatggcctgggcctgcccaagggtgtcttgtgaccatgagggagagtctgcagaggacagggcccctccccgtgcaggagggcctggctagttgagtgagtctctgatgaggcagtgcctccgagggtcagtcatgctcaaactcagtgtgccccaagtcctgacccctggtattctgggctatcactgcccaggaaaacagcactccaaaccctggccttcaggcctgttcctttatgcttatcgctggaatccctggtccagagggtcttcaaatccacacaagcccctcctgcttggccctaacccgatgggttaagcgtttcaagggagggcttgagaggtccccaggacatgcctggagggccaataaatgaccgtgaacggtggtgagtgaggcaggtggagagtgtgaccatgaagagcagggcagactccccagagtactgtagggaggcagctgcagtctggatgaagagtacacgccaaggccaattgtggttgctggtgggatgcagctgggaaagcgagagtgaggaccccagaccctggcggctgcaatgcctgggggcatgtgacatggtggtgaagggggaattgtgtgttgatcctaccctggccgcaagtccaggctcacaggccatggccactgaccacaggaagaggcctccctccttaaagtcgggagaatatcccagaactaaggctagtcctgcatcctggccgggaatcccaggccaacaccctccccgcgatcttaggtgcttagcagccctggctggtgacccctgggcggagagagtacggtaatttgcaagaaatccaagaaagccctggtgagtggttgcttttcctatgttgcaaccatccgcgaagtgaatgctgctctgtgtctctattgttgttttgatggtgttcgagatgatgaggagaacctgagtcacagcctttacgagtctgatttcctcaatttacaggagctgcctacgcgttctggaagaattcacatgctgatttgtaggcggcctggccaggtgcttcggagactccagcagcatcgaaggtgtgattttagatctgtactcccgaggctcttgtgttatttaagaaggtcagtgtgaggccgggcgcggtggctcacacctgtaatcccagcactttgggaggccgaggcgggcggatcacgaggtcaggagatcgagaccatcctggctaacacagtgtaaaccccgtctcaaccaaaaatacaaaaaattagccggcgtggtggtgggcacctgtagtcccagctactcgggaggctgaggcaagagaatggcgtgaacccaggaggcggaggttgcagtgagccgagatcacgccactgcactccagcctgggcaacatagcaagactccgtctcaaaaaaaaagaaaaaaaggtcagtgtggttaaatgcataagaagtaatcagtgtgttaaatgtatgagttaattgagcatagcccaagtgaaagtgattgtgttttcatattaaaattagatttataaagagaatgctaaaacttgttggattttggaatgcaaggtctaagtaaaggtaggttttaatattgacaacttttacacttgatatattgactctttttttttttgagactagactctgttgcccaggctggagtgcagtgctgtaatcatggctcactgcagcctcaacctcccaggctcaagcaatcctcctacctcagtctctcaaagtgcttagactacaggtgcatgccaccatgcccgactaattttttaaaaaaaatttttagcgagatgacttagtgagaggtctcactaaattgtccaggctaatctcaaactcctgggctcaagcaatcctcccacctcagcctcccaagtagctgggactacaggcacgcaccaccacacccagataattttcaattcttttttttgtcgatagggtcttactattttgtccaggctggtctcaaactcctgggctccagcaatcctcccacctcggcctcccaaagtgctgggattacaggtatgagccaccgtggccagccttgactcaattcaaattcaagtcactaagtcttccttggaaagcacaaaacctcccccaggcattaaaatattcaagtgacacagaaaagggagaggtgaagaggagctaccacctggaggagaaggtgggctctgagccgggcctggagccaggcagggaggtcttcttagcacccagcaagctgcaccacccaagcactgccctctgccaccccacctctgctggcatggaaacctccctctgggggtccctctggcttcttgggtggagcctctttttttgagacagtctcactctgttgcccaggctggagtgcaggggcacaatctcgcctcaccgcaacctctgcctcccgacttcaagcgattctcctgcctcagtctcttcgcatagctgagattacaggcacctgccaccacgtctggctaatttttgggtttcaccatgttgtccaggcaggtctcgaactcttgatctcaagcaatccacctgcctcggcctcccaaagtgctgggattacaggcgtgagccaccacgcctggccttgagtcgagtcttgatgtctcaatcacactgccccaaatccatacacttgtttattcattcagcaaacaataaagcacctggacactccaggttccatgccaggagctggagttcacaggagagcacaggcctcggccctggggctgagtcttgccgccttcttcatggcttgtgactgctgtggtctgaatgctggtgtcccgcagattcatgtgttggaacttaatgcctaatgggatagtactaagaggtagggccttagggggctggttaagtcatgagggcttcaccctcacaaatgggattcatgcccttataaaagaggcttgagggagcatgtttccccttccgccacatgaggacacagcaagaaggtgccgtttgtaaggaatgggtcctcgccagacaccagatcggccagtgctttgatggtggacttcgcagcctccagcactgtgagcaatgaatttctgtcgttagaaaattacccagtctaaagtattttgtcagtccgggcgcgctgcctcacgcctgtaatcctagcactttgggaggccaaggcgggtggatcaccaggtcaagagattgagaccattctggccaacatggtgaaaccccgtctctactaaaaatataaaaattagctgggcctggtggcacacgcatgtaatcctagctactcaggaggctgaggcaggagcatcgcttgcacctgggaggcagaagttgcagtaagccgagatcacgccattgcactccagcccgggagacaagagtgaaacaccatctctaaataaataaataagaaagtattttgtcatagcagcctgagcagactaagcccctggccctcactcagcctctcctcagcctgccactcctgatggggacctactctggctctgtcctccccacccaaacacagcacccccacaagcagtggggagaggtccccagtggagcaggagtcctcctggactttgtacctggggccaccccagcagttaccgctttaaaaagaccacaacaaatgctaagctttggtgttctttatagaattctttttaaaaaacaaaaaaatgatcatcatgttttgtttgttttccatttagaagagaaacactttctcattattttaaaaatagaaacattacagaataggtactgtggaaagtgaaactgtcctttcccccgccaagcctctgtccctctcttctttcttcctgggggctcagcctgccagggccactgagctctaccatacaggttatagctacctgtcacttcttttttttttttttttttttggcccaggctggagtgcagtggcacgatctcggctcactgcaacctccgcctcccgggttcacgccattctcctgcctcagcctcccaagtagctgggactacaggcgcccgccaccacgcctggctaattttttgtatttttaggagagatggggtttcactgtgttagccaggatggtctcgatctcctgacctcgtgatcagcccgccttggcctcccaaagtgctgggattacaggcgtgagccaccgcgcccggcccttaattttctttttaatgcttctccgtattttctagctttctacaaagattaagtaatccataaataatttaaataaagtatcatttaaaagtctattctttttggccgggcgctatggctcacgcctgtaatcccaacactttaggaggcctaggcaggcgaatcacctgagcccaggagttcaagaccagtctgggcaacatggtgaaacccagtctctactaaaaatataaaaattagtcaggcttgatggtgcatgcctgtagtcccagctactcgggagactgacgcaggagaatcgttagaacccaggaggtggaggttgaagtgagctgagactgtgccactgcactccagcctgggtgacaaagcaagaccttgtctcaaagaaagaaaagaaaaaaaaaaagtctattctctttgattcaatatttactcttctgggaaagcaccccaaagaaataattctaaatcaagaaaaaggcctggtgtggtggctctcgcctataatcccatcactttgggaggccgaggtggacggatcacctgaggtcaggagtttgagaccagcctggccaacatggtgaaaccccatctctactaaaaatacaaaaattagctgggcttggtgcatggtggtggtgcctgtaatcccagctactcaggaggctgatgcaggagaatctcttgaactggagaggtggaagttgtggtgagcagagatcgcaccactgcactccagcctgggcaacagagactccgtctcaaaaaaaaaaaaaaaaaagtgttgtgcaggaacaaaaagattaagccaagcagatttgagcctcctcaagaaggcccttcctgacccaccctccagcacacctgtctggtgggagactgaggcacaagagcaggcatctgcgtgggaccatcactgtcttcggagttgaactaaaaatagtggagcgtggccagtctacacggacaccagccatcctcttgtttcgtgtttgctaaatgctgtgctcagcacttttctgcattattttattttattttcccaagaactctgcgtgggcagccactcttcttatcccccgtttcaagaacttactcacggaggacctgctcaagggggacttgcacgcagctcagtgggggcagagctgggactcggagcagggcccacctacctcctggtccgtgctcttaccctgcaggctgagccgctgcagtgtggctcgtccagcagggcctcatgctttcgggtgatgcctaacagccattccccctcctcctcattaacagagctccagccccacgggatgaatagagatgggcctaagctggtcctaccaaccccctgctcttttgccagtgattgatctagagtgcctatgtcaccctcacccaggtctgccagtgaaatgtagcgggggggatttctggagggcatttgctcttgctcactgcactgttacgtgagggggtgatgcttggagctgtggcagctcctttgtgcccatgagaagcagtagccctaatactagggtgagcagaaatccgtttgacttccttcaatacaggactttcagcaccaaaactgggaaagtactaagcaaatcagtatgattggtcaccttaaattgatgacacgggaagatagaaacttgggcccttgtcaagatgctaacctctggactttttttattttttattttttgagacagagttttgctcttgtagtccaggctggagcgcaatggcgtgatctcggctcactgtaacttccgcctcctgggttcatgcaattctgctgcctcagcctcccgagtagctgtgatcataggcacgtgccaccacacccaggtaatttttgtatttttagtagagacagtgtttcatcatgttggccaggctggtctcatactcctgacctcagatgatccacccacccagcctcccaaagtgctgggattacaggcatgaaccaccatgcccagcctggacgttttgttatgtaaacaatgactgtcttttttttttttttttttttttgagacagagtctcgctccgtcacccaggctggagtgcagtggcctgatctcagctcactgcaacctctgcctcctgggttcaagtgattctcctgcctcagcctcccaagtagctgggattacaggcgtgcaccaccatgcctggctaagttttgtatttttagtagagatggggtttcgccatgttggccaggctggtcttcacccctgacctcaggtgatccacccacctcggcctcccaaagtgttgggattacaggtgtgagccacctcgcctggccacaatgactgtctttatggttgaactcttcgtttcttgcggctgaaatcacaggggtgagacttgctggcctcccatgccctgtcaccccttgcgtttatgctgttccagtcccggagcccctggcccccaggtctgccatggatactgtgtccatccagccaggcgcctccctaaggccacctcctcctcaggggcttcccaggtgtcccagcagccaggggcaggcgtgccccggggttactccttttttctgacgtgtctcatgccctgcctttgtcatgggtcgctgggcaatcactgcttctcttctcgcctgtcccctccaccttcctgttcccccacaaactgtgagcccatagggagcagagagtacggcttcctgtatctttccctcatcccagcctcatggatcacatggagagcaggccacagactcagtttaaccagtctgctacatgtcttctctgggccaggaaacgaggtcaggcctcctcattccttcctgggccggcgggctcccttcacctcatcctgttcctgggttattcgcttctgacgcgaggccctagggccaccccagctccacatcggcctgtcttctctgcgccctgtggctgactcagccctgaatcacctcttccaccccaggtcctcttcccgggagaagctccaccatgggtgccatttctccttgtcccaggcttttcttgcctctggggactccaagcccttctccgggggatttcacccagctgctgtatatgactctctgtcccctctctgggccttagtcttctcctctggtaaaaaaggattcaccttgatgctatctaagtccctcgaatgagactctggggacaggaagtatttcagtcgatgtcgtcatgttgccagcttcacggggaccaaccaatgggcaggggaaggaaggagggccacgccagtgtgtctcttgtcctggctaggcatagggtcccaagccagagttggggacaagctgaccaagcaaacctcttggggtggctgctcctttcccagggaatccatgcgagagggtggccagggtctgcaggcaatgccaccgggccactgtggatgggagccagtggacttccaggaagggaagctaaagataccctcttcccggcatagcccagaaaggaccgggatctagttccctgtcctgttgtctctgggggcaggggtggtgaccctgagggccctggagcagctatgtggggctgggcacttctgggggctggagtctgggaccgggcatctattggccgagactctggaccggtgggcgagggcagggcagggtgggtgaattactggaagccccactggctctgtctctctgccaagctgcccactgcattctttggcctcctatttccaggcagtgtctgggatgggtcccaggcctggcctgccctgcaccggggagtccgtgtttggagtcaactgagctactgcttagggcggcagctgaggtgggtgggtgcagcttggacatgatgctatcagggacgctgggtacctggaacaaggaccgcctctccctagtgccatcctgggagctcaggtgacctgggagggaagggacatgtgtgagtgcctgtgtgtgcgcaagcgttcattgtggggggtgtgcacgtgcgtgtgcacacgctagcataggtggctgcgttgagacgaggggtcacaggcccgcatgtgcccgagtgtcctaggatgtgtgggtgagtgcaaaccttgggcaggccctgtcttctctagacatccccgtctggtggggtggccagaggggtggcatgggcagtttgggtctggatccctaacccacaacctgccccagggcagctgcccagagtgcttatgccagaacatctccaaggccgccagacgttgggatcgcatgtgccactgcattggctgtccccacccccatccccacgcctctgcccagggactgtagggtcggcgagaagcaaaggcgtgcccccatgcactctggtggctgcaccatggacactgaggttgatgcctggggttttcttagttttttttttaatttttaaaatttaattttttatttacttatatttttattctattatatttttatttaattatttgtttttatttaattatttttactgtgctcaaatatacataacataaaatctaccattttatcacatttatttatttatttatttgagacagagttttgctcttgttgcccaggctggagtgtagtggcatgatcttggctcctgggttcaagagattctcctgcctcagcctcccaagtagctgagattacaggcgcttgccaccatgcccagctaatttttgaatttttagtaaagacagggtttcaccatgttggccaggctggtcttgaacccctgagctcaagtgatccacctgcctcggcctcccaaagtgctgggattacaggcatgacccactgcgcctggccgtttgtttttgaggtggagtcttgctctgttgcccaggctggagtgaagtggcatgatctcagctcactgcaacctctgcctcccaggctcaagcgattctcctgcctcagcctcccaagcagctgggattacaggcacccaccaccacacctggttaatttttgtagttttagtagagatggggtttcaccatgttggccaggctggtctcgaacttctgacctcaagtgatcctcctgtctcggcctcccaaagtgctgggattacaggtgagagccaccacacctggccccatttttaccacttttaaacgtacagttctgtgacattaagcacattcccattgttgtgcaaccatcactatgacccatctccagagtgctttcatcttcccaagtgaacgtctgttcccattaaacaccaatgccccattccccctgcccccagcccctgcccccaccaatctgctttctgtccccacgaatctgactgcgctagggacctcctgtcagcagagtcacacggcatttgtgcacggcatttgtccttttctgctgggcttatggcaatcagcacagcgtccccagggctcacccatgctgcagcctgtgcctgggtttctctcccttccagggccggctgctcctccgtgtgagtttctccgtgtcgtttccccactgatccgcaggtggacacctgggctgcaccttctggctgcagtgaggagcctagatgttaagcctggcactggacagtggtgggcacctgggcacgtgatgggaccccctgagtctcactttcttcaactatggggcaggatctgtaacggttctggtggttttatttatttatttatttattttgagacagcgtctcgctctatcgcccaggctggagtgcagtggcgtgaactgggctctctgcaacctctgcctcctgggttcacaccattctcctgcctcagcctcctgagtagctgggaccataggcgcgcaccacgcccggctaatttttttgtatttttagtagagacagggtttcactgtgttagccaggatggtctcgatctcctgacctcgtgatctgcctgcctcggcctcccaaagtgctgggattacaggcgtgagccaccgtgcccagccacggttctggtgtttaagtgaggtcaggcatcctctgggaggtcagccgtcgtattgggttccaggcccgtgactactcacgggaggagtgagctgggccactgactccgtctctcacaagcctggaactggggagcaggagaatccctcacctcgtggggctgtggtggggacacttgtgtgggatgcagccagctcaggataggggcagcgaggaccaggcacgagtgggaggagcggggccctcagggctctgtagggttcttgactttttctcgcttctgtggcctcctcctatctccttccctagggccccacctggccttccgaatcctctcacggggcatatcagatctaccccagctgcctgaccgggagagcatcctgttcttcccctctggaattccgggtccacagctgtcttcctactcacatctggcctcggcattcccgccaagccctccccttgaagcacaaggatgttttgtccaggatcctgagcccagggccttccaggtggcagagagagatccggatgtccagccagctctgggggttcccccatcctgccagtgtggggacctccttgctgtagccaggtcaggccagccctagggagacagcaggatggttccaggaagcctgggccgctccccagatcaatgcagggacggacagcagccagcaggctgggccacggcatcagagctggggtcaagaggtttctagccctcttgtggctctcagccccgggtcctggctgcttcctgctgggcagtgacctccccagtccatttccctccctccttcctcccctggcctgagctcagctcatggaaggaggccctgtgtgcaggaaccttgatctgcacctctgaaggatgtcagggcagctttttctctgggcctgtatgactcagcgcaggatttagggcaggtggctccaccgtggagcctcagtttcctcatctggatgatgtgggtggacaatacccagtgcaggatccgtccaggcttacatgagacagcaatatagaagcctagctgatcacggcccccaacacaccttaaccccttcccactccccagctccccatctctagaccgagggagccaattaggctctcccgcagcaacaggtggtgagatagaagcttcgaggtggaggtaaagagtgaggactgtgcagcaatgaggagtggcccagatgggtctccctcccttcctgtgccacttctgcaggccccagtgcctgaggggtccagggccctatttggagagctccatggtggaggaggctgctcctccttcctgtggaccactccctgtcccaggggctgctgaccctgcttcactgcctggtggtggatgacgaggtcattatgagattagcacacactccaacgctgggtggagaaactagggtgggagccgagatcttctccagctagttcatgccctgaacaacatgagaaggaagctggggatggtctcacactttgagcttctcccacctgtcaaggttccctgtcttccttccagagccctcttccagcccctgcagcctctgtccccactgccatcccttgtgtggtgaccagtctccaagatggccccccagatccttgtctctggtattcatgcccttgggtagcccctcccacaccgaatcaggcagattcacatgacttcaggtctagggcataaagcatcgcctcttccatctggtctttcagctcagatactctgggggaagccagtcactattccacgaggaagttcaactaccccacggagaagctcatgtaaagaggaactgaggccaccagccaacagctgcatgaatgagccaccttagaagcgatcctccagccccagtcaagccttcagatgactgcagctctgaccaccatctcactgcagcctcatgagagacctcaggccagaaccacccagccaaaccactcttgaattcctgacccaccaaaactgtgagaggtaataaatgattattgctttaaatgaccaggttttggggtgaactgtaatatagccaaagtaaccagaataccttgggaaattgtaccccgactcattgagaaaggcatcccggtgtgtctcctctctgaaagctcagtcctctgcaggctgctgtgttagttttctatgctgtgcaacacattatcacgcactcaggaactaagacaacacgcacatttactatatcacaatttcttcaggtcagaagtctggaaactggctgggcatagtggcttatgcctgtaatgcaagcactttgggaggccaagggaggaggattgcttggggccaggagttcaaggccagcctgggcaacatggtgagactacacctctacaaaaaaaaaaagaaaagaaaaaattagttgggcatggtggtgtgtgcctgcagtcccagttaggaggctgaggccaggggatcacttgagcctaagagttcgaggttgcagtgagcagtgattgtgtcactgcactccagcctgagtgacgacagcctgagtgacagagtgagactctgactcttaaaaaaaagttaaaaaaaaaaaaaaaggataagtctggaaactgctttactgcatcctctgtttcagatctcctcaggttgcaaacaaggtgtcagctgggctgggttctcatctggaggctcaaccgaggaaggctctgcttccagagccatgctagttattgtcagatttcatattcttgctgctgtgtgcctaagggcctgaggtttttgctggctggaggctggagaccacctgcagttcctagaggctgccagcacttcctcacctcatgggcttcctcaatgtggctgcctactccaccaagccaatgaggaggatctcagtccagtcagctaagttggagtcttttctaatgtaatgtaatcatgagagtgatgtcatcatctttgccgtgttctattggctagaagaaactcctaggctttgcctacatgcccagaggagcttacccaagggtgactgcttgcagtcattttaaggtatgtccacagttactgatgggggttttctttggccagagccttgctggctctaaagagggagagggtctctgcctcatgactgggtgccccatgacatgcatttcctgatctccatccagttttctacagcagtgagagctaagaagactggtttcccaacaattaggcttttttcccagttaagatggaatagtcccatttgaatcatgcacgtttgttggttaacatgattctaacccaattcctacaaaataatgactctggtaccacaattgagcttactgtgtgccagacaccaaattaggtacttaaaaaaaattgagatgcaattccattacgttgccctggctggtcttgaactcctgggttcaagtgattctccagcctcagcctccctagtagctgggattacaggtgagcgccaccatgcccggcctaattagggactttaattcattatcttatttaagaatcacaacagccttatgagtaggtattattattttcagggaatattccttctgaggcacggaacacacaagtgaagtgtccaaggtcagctaatagctgtcagccagggctttttgaagccagtgtaaactgcccgaagcaattagcaggaggttgtatcactggctcccatgcagaaacacaaaggcttagagctgggcctcaggcacagttggatctagattcaccagtgatgtcacctggaaactgtccctctccatctcccaggtcggctttcctctgccatagcttcgccctcaggcaggctctctctagcggtagcagaaatggctgcagccagctccaggaaaaggccggggctggatggccttggcctggttgggtcttgtcccaaccgggtctggaccaactagggtgtgcatgcggtgtttgaccagccctgagcaggtcaggcccatcgctgagccacatacagcaagagtgatgaaggggtagaatccaagatgcttccacaaagagaagagaaagtgggtgctgagcaggcaacagcactggatggcagcctggggacagaactagattccaatccagttccatctgactccagggtgctgctgtcagtcactgtgctgagaagagtcccgggtgtggccaggacctgtactgggtgccaaactcactcccaggcgagtccttcccggaaggggggcaccgtgaaggcacaggccctctgtagaaaataggacacgggcgggggaacagcttgcttcttttttttttttttttttttttttttttagagataggatctcactctgtcatccaggccagagtgcagtggcatgatcatacctcactgctccctggaactccagggctcaagtgatcctcccatctcaggtttccaagtggctgggactataggtgcagcacgtcaccatgcctggctaattttcttttcttttctttttttttttttgagaccgagttttgctcttctcgtccaggctggagtgcaatggtgtgatctccactaactgcaacctccacctcccgggttcaaacaattctcctgcctcagcctcccaagtagctgggattacaggcacccaccaccatgcccagctaattattgtatttttagtagagacaggttttcaccatgttagccaggctggtcttgaactcctgacctcaagtgatccacctgccttggcctcccaaagtgctgggattacaagcatgagccaccacacccaacctttttttagagacagggtctcactctgttgcccaggctggcctcgaactcctgggctccagcgatcctcccaccttgacctcccacaatgctgggattacagcatgagcgtgagtcaccgtgtccggcctgaggggcagctttctttccatgctagggagagtagagcagctgagttaagaatggcttctgttaccagcttttccatgaccagcagttattgcttgggaggatttgggatgcttcttgttgcaggatttaatccctgcagcagccctggcaggtaggaaacatcaccacccccatcaggagggaagctcgaggctcaaagtcctccagacccaggagtcatgggtcttaatccctcacttagagaggagagaactgagggccagggaggggaatgacccctgagcttcctgtccctgtcctgggtacctctggtctcacctccagtctcctttgattgacattgtatttttagatgggtaatacattcatatggttcaaaattcagtcgtgaaaagagtttactgagaaatgtctgtctttgcgatcggccgaataatgggcccccaaaggtgcccatgtcccgattcctggaacctgtgactatgtcaccttatatggcaaaagggactttgcaaatgtgatgaagcttaggctcttgagatgggagattatcctggatcatctgggtgggccctaaatgtaatcacaggggtccttctaagaaggaggtctgagagatccctgcctgctgactttgaaggtggagggagagtgtcttagcatgagctgccagaacaaaattccacactgggggctgaaacaacagacacttatttctcaccattctggaggctgggaagttcaaggtcaaggttgtggctgactcagttccccgtgaagtttctcttcttgacttgcagagttgccttctttttattttttttttcaattatttatttatttatttattttttgagacagagtcttgctctgttacccaggctggaatgcagtggtgcgatcttggctcactataacatttgccttcctgattcaagcgagtctcccgcctcagcctcccgagtagctgtgattacaggcatgcgccataacgcccggctaatttttgtagttttagtagagacggagtttcaccacgttggccaggctgatctcgaactcctgacctcaagtgacccgcccaccttggcctcccaaagtgctgggattataggcctgagccaccatgcccagcctttattttttactttttgagacagggtctccttctgttgcttaggctggagtgcagtggcacaatcacagcttactgcagcctccacctcctgggctcaagcaatcctcttgcctcagcctctgaagtagctgggaccacgggcacacaccagcacacccagctaattttcttattttttgtacagatgagggtctcactatggtgcccaggtcgttctggcctcaagacatcctcctgcctcagcctcaagaattgctggaattataaacatgagccactgcacttggctcacaaatcgttttttaaaatgtatgtttccaggccggacacagtggcttacgcctgtaatcccagcactttaggaggccagggtgagaggccgaggtgggcggatcacctgaggtcagcctggccaacgtagtgaaaccccatctctactaaaaaaaaaaaaaaaaatgcaaaaattagctgggcgtggtggtgggcacctgtcatcccagctactcgggaggctgaggtaggagaattgcttaaacccagagacagaggttgcagtgagccgagatcgtgccacactgcactccagcctgggtgacacaagactccatctcaaaaaaaaaaaaaaaaaagtacgtttcctagcatattttatggacatgaaagcaaatgcttgcatatacatatacactttcttctttctttctttctttttttttttttttttgagatggagtctcgctctgtcgcccaggctagagtgcagtggtacaatctcggctcactgcaacttccaccttctgggttcaagtgattctcctgcctcagcctcctgagtgagtaggtaggattataggtgcataccaccacacctggctaatttttatatttttttagtagagatggggtttcactatgttggccaggctggtctcaagctactgacctcaggtgatccgcccacctcagcctcccaaagtgcggggattacaggcataagccaccacgccccgccaaactttcttctttctacccccatacaaatcatagcatgccatacacactcttccgcaccttgatttttatcccttaatatgtattagactgtcagactgtcctctatcagccttgaaagggctctcgctctctcccttccagtgttcctttggacagatgcgccagcacctatgtgccccattgctgcattttgcactgtgtacctgtcagggttctgtgcaaggcgaatccacctcaggtggttcaagccaaaagggattttaacataaggaatcaggaattcataaaatcattggaaaagattcatgggcttgagaaaaacaatcactgggagagatggaaggtcaaagctttctggggtaaggccacgcctccaccacagtccccgatcctccccactcccacacccacaaatcaggcactgagatggcagaatgggaaatggagccactgccaaccagtgcttctgctggaacccactttcatacccatgcagctgcagaaagacaagagtctgtcttccttccactttccaatcccacaagaacgcattgatttgcagagagaaagtcacatctagagagaacctgggaaagagtttctagctttcccactgctgtggtctgaatgtaacccccatcataactccatgcaatagtgttaagaggtgggttctttgggaggtgattaggtcaggagagcttctccctcgtgaatgggattaagacctttataaaagaggctttgaaggctggacgtggtggctcacgcctataatcccagcactttgggaggctaaggctggcagatcacctgaggtcaggagttcaagaccagcctggtcaacatggcgagacccgtctctattaaaaatacaaaaagttagctgggtgtggtggcccaggcctgcaatctcagctactcggaaggctgaggcaggagaatcacttgaacctgagaggcagaggttgcagtgagctgagatggcgccactgcgctccagcctgggtgacacagggcgaggctctgtcgaaagaaagaaagagagagagagagagagaaagaaagaaagaaagaaagaaaggctttgtagagtgttcaattcagctcattttttgcccttccatcccttctgccctgtaaggatgcagtgttcattctctccggagggtgcagcaccaagtcaccatcttggaagcagagagcagccctcaccaataccaaacctgccagcaccatgatcttggacttctcagcctccagaactgtgagaaatacatttctgttctttgaaaattacccagtctaggtattttgctaaagcagcatgaatggaccaagacaccaaccatctaaaaaaaagattaaaggagctgattccaccagccagcatcttgctgatcttccacaccatggcataaaaagcagcaagagctttcacctaatgctatacaactgtgccccaaacacacacacacacacacacacacacacacaccctctccccagaatgaaaaacctgatgttctgatcagtcactctccagctgtgggtggtgctcactcctcttctgggcagaaatcccatgagattaattaaagtcacccatccccagggcccccagaggcataagtatcatttgcaatatagatttttccaatagtgccctcttggaattgtgcagtgtgcagcctggacaacattatgtggtgaccctgggtcctatactttatgtagaatagtaaggaaaaaaaaagagggaaaaaaggaaattagttaacataaacaaaaatgaacaggataaaggggaaaggtgtatggtggtccctcactctgccatagtttctactgataacttcctccttccaccatctagccataatccctcccccttggccagcacctcatatggtcgtggttctacctggggtaaccccatctgtatataatacagccgtcccgctgcaggccaggtcgtgaaccaagcttgcaataggagatacccgtgacacagcccctgcccttgagaggagtctcaggcagtaacaaacacaggccactggctgggcatggtggctcatgcctgtaatcccagcactttgggaggccaaggcgggcggatcatttgaggtcaggagttcgagaccagcctggccaacatggtgaaccctcatctctacaaaaaatacaaaaattagctaggtgtgttggcgcgcgcctgtagtcccagctacttgggaggctgaggtggaagaatcacttgaacccgggaggtggaggttgcagtgagccgagatggcaccactgcactccaacctgggtgacatagcaagactctgccaaaaaaaaaaaaaaaaaaaaaaaaagctgggggaagggtgagcgtagaaaatagttgtagttaagagacggggttggctggttcagcttccaaagtctaggatttggtatctgatagtaagagcagtggccaatgcgggggtctccaggcagggccctaagcaccgcgccaggttaatgctcctcgcagctcttgggcaggactgactgttggaggcttgtccagcagagacaggaatgaggggaccgaggacccaggcatgatggggcgggggcgcggggacctgcagcccagcgggctcggacgacctcggacccccgccgctccacgggcaggaagggagcccggagcggcgcgggtgcgcattgatcgtggtgcggatgcagccgctgcggcgcggccccggcttctctgcgagcccgtgcccgggccgggctgtcgggaactcggcccggctccacttgctcgcgcttactggaaacgtgctcccgagcggcgcaaggctcggcggctggagcccggggcggcccttggccgagggcagggccgagccaggtgctcgggcgccccaggctgccgcgccctgctgggccaccctgggcgcgtgccacccccggggacccgtcccgtcctgagggcgcccagggcctcccagcgccgctctccccagggtgagcgggaggagggagggagctgggggcagcccggggaagccgtggggcgggctttcagcagctgcgaggcgaacccgcctcccttcccggtattctcgcggccacccggtggaaggtggcgccacgccagggccaggcggaggcggggagccaagcccgcagccacgccctgcccagggcgcaggtgggctcggctggaggaggtgctgggggtgggtgtgtctcctgacacaggaagagctgcctcctggctgccccagtcacagaaatgtttattgagcacctactaggcaaggtgcgaccactgcagtgggggtgggggcacttttctccccgggcgtgtatatttatttatttataaaccataggcactttattactgggtttatatattatgtatccatagaagttgagatttaaagaggatgaattaaaaaatagaaacagaggggttgttttcctttccgtatgccagtgagttgtcttatacatgtcccactttggagacctgggtttagtggctgtatcctgctgggcgcccccctccccagagctggagacaaaacccccacccgccccctggttcacgtcatcctgcctcatgaggcccagggctgagctgttttcggggccctggtctcggcttcacagcctgcagtggagtgtagcagatggcagactagggtaagtgaggatgccttgagatctgggttcaaatcttgcgtctgctgctccctggcccagtgacctcgcacctctctgagcctcagtttcttcttctgtaaaataaagggagtggcatctccctcttgcccggaggtgggcctgggggctgcaggctgccctcctgatctgctctgctgccagatgggcacagataggcggggggatgacagccctgagtgaacccagaaggcaaagtggttaggaacacaccccagaggccaggcagggtcctgcagggtcctgcagattcagagaaagaacccatttatcctggggtttggcagagattatggttccggtaaagggtggtcattagtaaagtccatgtcatgcagccgagggcctgtgggaaaggtagggttcaaggaggagttagtgggagaggagagtgaggaatcagagttggtcagtcagacagtcagtcaacaaacacaaactgagcatggcctctgtgccaggcatggttttaggctgtggataaccaaggagcttgctcagcagcctggggttctttgcagcccagggtgtccctgtcaggagtgggcactgtgtctctgaggagcagtggagtcacctgcaggccaaggctgggaaaccctcaggagtgtgggggaggccaccccctgaggtgtggtccccccctgggtagagagtgactcaggccccgcccagcctccccactgcctgggtttggtttgtttaagaacaaattagtcacagagcaggcagctttcccgaaaataaaatgagaatccccaggaaacagggaaaatggaaggcgggcggtgagtcagcacgtgctgccccccggggctccagtttccaaaagggcctcctgccctgctcctcctcctcctcctgggtctctctctttctcttttacttttcctctggtcccctgttgactttttccctcaccgaactcactgaatctcagtcctcacacacgcgcacccactcacttcctgccccttatcgtttccctccctgcatctgtctgtctgtccagcctcgatctgtgcacccactggctcctttggtgtttacagagcacctaccaagtccaggcactgtgcaccacgggagggagtggggaggcagagaaggcctaggtctctcctcccagagccctttcttgttggaaaaggagacttgtgccgggatgtggccagccacggccgcgcctgggtccccttccccagcccctgctcctgtggttggttcccccggatggacagagctgggcccccaacagagaacgatgcttgaggatcccattccaagccaatgccgtctctgcctccctcccggctcggagcacaaggcctgcacgctgagggcgagtgcgtggtggagcaggagcttcggggcggtgtttctcacccagccatgtctcccctgcccagaaccgggcatcaaggggagtgaactgcgggctgttttgaatttgagggacaagcttggttgtcccttgttccctgcctccccattccaagcctcctgtggcagaaggaggccaggccatatcttgagggaggattctgggcgtgcctgcttcaccccaacagcccaaggtcaggggaggggctccaggccgcagggggtacagcaaggggaagccactcaggccccttcccatctggacaagtccctgagtgccagggccctttgactctctcctgtctccctcctcccccatctcccagctagaatccaggctctcccaccaccctctgggacccctggggccgctcactttccagacccctctaattcgggcactggcccctcaggagccggggaggtggccctgtgcctgggtcatggggctgggctggggtctcctgcctctcgggtcactgtccaatctctgtctgcagctctcgatgaataatttagttgttcgaattacaggaaagagctatttagcttcccttcccaaatcgttaagagctgatgatacaagacgtcttggttccttctaaggaaagtccctttcccagtgaaactgagccttgtgggcggggatttctccccctccaactccctcaccaatcattaaccaatatccgacagtaatagggttttttcttttttcttttttttttttaagctcagctatatatattctaaagtatatgtcagttcttgggagcagggaagtataactgatctgaagggtggggtgggggttctgctctggaaggagccttgggtgagctaatggtgaccccaagtcataattgcaggtccctggaggggatttaagatataggaagtagcacttcgcaagcctgagaggaagaagcatggggtgtaaaactgttcaggtggttcaagagtgcgtgtgcgtgtgtgcatgtgagtgtgcatgtgtgtgtgagaatgtgaatatgcacatgtatgcgtgtgcacgagggcgcacacgtgtatgcacagatgcacacgcatacctgtgtgattgtgcatgtgtgcgctgtgcatgtacatatgtgcgtatgtgtgcacgtgtgtgagtgtgtacgtgtttataggagcatgactgcctgagcggcatggctggaatgtgtggaccgggaccaggtgggggtttgcagtgcagggacagcacttcttgttttcagagctgggagagttggggtggggaatctgggtagggctggcctcccagtcaggtgacttgcaggcagggaggggaggggctttaggaagttcagagagtgggagggaggaacagggaagggcaagggtggggaccttggctggaaggttcaatgcaaagtgaggcgacatccaggattgagcattctggatcctagacccagggatggctgggaggtggggctcccctgggtgaaggagccaggtgggtgtgtgagccaagagttagctgtggctgccagaggagggggctggagacgaggctgccagcctcagcctggctgaagaggacctcccagcaccaggccaggggaaggtggacaggtagggagagaaaaaggagggaaggaatgaggactgagctagcaggtcccacactttgcaggtgtggtgaggaggagagagggaagaagggggaccctctgcagtcctggctggcaggaagcttggcctgtgctctggcaagcacaccctgccctgctggactcactggaggagtctgttctctgtgtgcccggcagagggatagacacgcatttcccacgacgtcacccaccccagaaccacttagcctgcagcctcccccagattccctgacttcccacctgagcaagcccagctggcctcccgcatccactcaggtgccctccgtgtgttgtcttccggacaggggcacccaacacaggtgcaagcagtgcgtgctagggccggagaggaggacagtggaggctgctcccagcctcctttttcttccgtactcccaccagcacctccaccccacctctgaaactccaccccaattctggggagtgtggagatgactgaggaaggggggatatttccagagccactccaactggtcccagatgcatcagagggtgaccctgggaggccagtccttaggcagctgcctaaggacccgactctggaagggaactcagagacaaatgaggagcagaccagccccagctccgggtttgcagatctgggcagagtgaggaaaaggccgggaaagaaaaaccaacccccggaatctatctcagagaagcatccgtccaggtagagagggaccccagcccgaccgccaccctcacccaggggagaagcctagcagctccctctgggttgggtgtgcatgtgtcatcccaccaaagtgtgctgggattggaatgggcacgaccttcccccagagagatcgcctgggcagccccgtaagtgtccaggggtcccctgagagcattctatggtcccagcctcccacaggagccccaacaatgctctctggctcctcatcctccttggtggcagctcctctccccaccaaagggccatgtgggtcccagctgtgacctcagcacccctcagccagatgtggacccgccccagactccatcactctctctgctctcttcacagaagagaggtggagggaggaccccacgggcctcgctggtggcaggcggtggggatgtagcgggggagtgtgtggggggggttagagttaggacagcagcccctccccaaaccccgatccctgagccccaagcctgtcttggctccatggggcaagggaggggtagtcaagccccacagaagagaggcatcccccagtttccatggagaaggatcggggtgtcctgatttggaggcttccatgctgtctgctgctccctgtggatacacagttggggcgctctctgttcctccctagtcccttctctcctccctgcttgcctgggaggcttgggcaggagggcacctggatggtggccactagacagagcccaccccccgccgcttgacctctgccctctcctgggtgggaatggcagggccctctttggtgtcaggagctggtggcctctgtggcctctgtcccgcccgctcccaacacctgccttcccttctctgctccagctgcagtcggcttctgccaatgcccagaaccttgtagtcttttgcccgctggttttgcatgtgcttcccctaggccagagggcagcaaactttctctgaaaagggccaggtagtaaatatttcagcctctgcttagtgaggaagcagccatggaccactcacgaacaagtgagtatggctgtgttccaacacaactgcgtacgcacactgcaacttgaattccgtgtgattttcacatcatgaaatattcttttttcttttgcttggtttttcaaccacttaaaaatgtaaaaaccagccaggcacagtggtttacgtctgtaatcccagcactttgggaggccaaggcgggaggatcacttgagcccaggagttcaagatcagcctgggaaacacagtgggattccgtctttacaaaaaatgaagaaattagtcaggcatggtggtgcacacctgtggtccaagctagtcaaggaggctgaggcaagaggaccccttgagcccaggaggtcaaggcagcagtgagccatgatcacaccactgcgctgcagcctgggcaacagagcgggaacctgtctcaaaaaaataattaaaattaaaattaaaacatgtaggccgagtgcggtggctcacacctgtaatcccagcactttgggaggccgggatgggcagatcatttgaggccaggagttcgagaccagtctggccaacatggtgaaaccctgtctctactaaaaatagaaaaaaaattagccagatgtggtggcacacgcctatagtcccagctacttgggagactgaggcatgagaatcacttggactcagaggcagaggttgcagtcagctgagatcgcaccactgcactccagcctgggcaacagagtgagaccctgtctcaaaaaaaaaaaagaaactaaaacgtgtaaaaaccattttttttttagtggaatcttgctctgttgcccaggctggcgtgcagtggcacagtctcggctcaccacaacttccacctcccggggtcaagccattctcctgcctcagcctcagcctcccgagtagctgggattacaggcacgcaccacgatgccgggctaatttttatatttttgaatagagatggggtttcaccatgttggccaggctggttttgaactcctgacctcgtgatccacccacctcggcctcccaaagtgctgggattacaggtgtaagccaccgcgccaggcctgtaaaaaccattttttgcgggctgaacaaaaacaggcagcacgttggatttagcctgggggcagtggtggaggtttgctgacccctgtactaggctgctccattggggaactctctcaaggttcagcggaagcctcccttcccggaccaggtgagatgccccataagacctgtactgcctctcttctggcaggccgcctagcaccctaggtgctcaacaacagtttgttttgttttgagacagggtctcactccgtcacccaggctggagtgacagaccacgtcttactgcagccttgacctcccaggcccaagcaatcctccggccctagcctcccaagtagctgggactacaggcaggcaccaccacacctggcaaattttttctatgttttctttttttttttttttctgagacagtgtcttgctctgtcacccaggctggagtgcagtggcgtgatctcggctcaccgcaacctccccctcccagtttcaagcaattctcctgcctcagcctcccaagtagctgggattacaggcacgagccaccatgcctagctaatttttgtatttttggtagagacggggtttcaccattttggtctggctggtctcaaactcctgacctcaagtgatccacccgcctcggcctcccaaaatgctgggattacaggcgtgagccactgtgcccagcccttattttttctattttttacagagatgaggtctcacttgttgcccaggatggtcttgaactcctgggctcaagcaatcctcctgcctcagcctcccgaagttctgggattgcaggtgtgagccactgcacctggcctactagtttgttgattaaaggtgcttcctacacattgtctcctttgatcttcacaatgtctgagcaaagcatagcaattatccccatccctgtttttgttttgttttgttttgttttgtttgagacagagtctcgctctgttgtccaggctggagtgcactggcaccatctcagctcactgcaacctccgcctcccaattctcctgccccagcctcctgagtagctgggactacaggagtgcaccaccacgcctggctaatttttctgtttttagtagagacggtttcactgtgttggccaggctggtctcgaactcctaacctcaggtgatccacccaccttggcctcccaaagtgctgagatttcaggcgtgagcccccacaccaggcatattattcccattttttaaatttatttttatttatttatttattttgagatggagtcttgctctgttgcccaggctggagtgcagtgtcgtgatcacggctcactgcaagctctgcctcctgggttcaagtgattctcctgcctcagcctccaaagtagctgggactataggcgcctgccaccacgcccggctaattttttgtattttttttagtagagacggggtttcaccatgttagccaggatggtctcgatctcctgaccttgtgatccgccaacctcggtctcccaaagtgctgggattacaggcatgagccaccgtgcccggcctattattcccattttatagacaaggtagttgaagtctagagaggttaagcaacttgtccaatgtcaccccgctggctgaggcagaggcacaaagggagtccgcacactgttttccgggcagctgggcagctggagagcctggcctctgtccactggtccagggctttaggggatgagaccgggctgttccaggggtccagggagcccagcctgcctccatccctggtctcaggcttgcttgggaactgacgggggtgctccttgacctccatccaccgaaaggcccctgcccttctgtggagcagcattctttacgagtcatttctaggactgggcttatgactcctggtcttcagggattgagtcctgccttctcagtcatcccaggtcagggctagagttagtgactctgattctgtagtccctggcccacccttcctgagccttcctttggagccatcacttagcccagctggggccagtaactgctctctcccctgccccacccccagctgtggacatgtccccatggtctcagcctcttctcagccctgctccactcagcctccagccagaccatctctgccaggccttcatctccccatgcgtcagaggaggatgactgcccggcaccctcccactcccagcgtcagcctgggaattggggcgtgctcctgggctgggcctgatgtacacggtgtgcagctgtgggctccctcccaatcacggggtatctcaggaggtttctgaggttggggatgggggtggccctctcctttggatttgaggcagtggccccaggaccagcggggtcactcggctcagcactcccttccagttctttcccacagaacatcctggcttcagggattcccatcacgcggccagagttcatcggaagtccccctccctcatcccctggagggaggaaacagaccaggtcatctggctgagcgggaggagaaggctcgggttctggggaggggagcctgggtgcggcagggtccagggacagttggcatgggcgtaagtgcaggtatagaattccacatagggcctcacagctttgggggccatgagatgacagcgtcaccaatatcagtgatcatcacctcccatccagaggccgaagaagcagggccctgccacaggcagccaggctggctctgctgggggaacaggcagaagaattacaaggaaccagatgtggttcttttttttttttttttttttttttaagatgaagtcttgctcttgttgcccaggctggagtataatggcacacgatcttggctcactgcaacctctgactccctctgactcctgggttcaagcgattctcctgcctcagcctcccgagtagctgggattacaggcacccgccaccacacccagctaatttttgtatttttggtagagacggggttcgccacgttggccaggctggtctcgaactcctgacctcatgatccgcctgcctcggcctcctaaagtgctgggattacaggcatgagctgccgtgcccggctccagatgttgttctttagaagaggccccaaagccctcttctctctccttcctgtgactgcagctgaactgcccagggtctccagccagtgaaagccaatgtggtcatgctggcccctcctgaaggcctcactctatgggcaaaagcagccctctggtatcagtcatatgcagagccacctgccagctgtcaccaggaggatggggacatgtttcctaggctgggggcaggggcaatgctgaacacttgcagagcaagtaggaaggaaagagggagagtggaaggaaggaaggaagggagggagggagggaggggagagagagagggaaggagagagggaggaaagatggatagaagggtagaggggggaaggaataaaataaagaagggagaaaggagagaggaaggaaggaggaagtgggagaggagggaaggagagaggagggacagggcgccactttgtgaggggaagccgggctgagaagcgccacttgtgtatttgcttatttctttgctctccggtggaatttctctgtcgtccccccacgtgcccttatctgtctccttgccatctccctggctctggccccagatccagctgggattggcagccctgtgcccacaggcccggttgccttggcaacgcccctttgttaggcaccagcatctgaaaatgtcaaactgtttccagtgggtcagacctgcctccctccctttttttccccttctcctttttcagttccagttgccactgcccaagttgcaaacttcctctgtctccatggggatggaggagggctgtctctctttttccgtcccaaacatctgtctctataaacagttgtgtgtgcggcacctcctcctcctgggcccgggcttcggggaggaagtgctttgttgatctggagggggtcggtttccttgctcctctctcggggctggccccggtgctggacggctgcagccgtggactccgggagctccaggcatgtggccagtactcatggctcctctggggccagtgtctggagagaagggcagaggttctgctcagtcatctggtagacctcagctttgctttgcttgctaggttgccttagagaggttactgaaagtctctgatacccctctgtgcggcggggatttgttgagtgggtaatgagctgatctacgcagagtgtcaggagcaattcctgggtctttgcgtcagaacactcctggagttcacgctcccagtgattctgcaccctacggtgaagatgccatgatcatactgcgatgatcagccccctttgggagaatgttcagactcagagaggttaatcggcccagggcttacagggacttggtggcagagacaagattccaccccaggaggcaagcccagacattttccaatccactgggacctctatcagaaccctgggccctcagtttgcaaactgaaaagcttagattcagtgacctccttcccagcttgaaacttctttatttcagggaagagggtggggcgagctaagaagctagaagcgttttgccgtgagccaaggaccaaggacgggaatgcacgatgtacgagcgaggagtcagggacggggactccgatggccgatgactcagacctgctttgcctggctgggggaactgggccatgggaagaacacaggactggccccggcccaggcccaacccccgcttggccacggcggagagcctgccccaggcccacctggccgaagcaccagcatcattccaggggcctcaccctgcctaactcccaagtccatgtccaacaccttttcctgtgtccacaattctcatgtggttcaaagacgtagatccattactgtttccagatgatcaaagcagctacctaattaacaaccgagtgaatgtccaagttagagctttggcgttggaacaggaagaactggatttgaatccagctctactaattagtggctgacttggatgggttaatctctctgacacttgtttatatcatcagtgaaatgagtggcagggtaacaggacccactggagatgatgcctacaaagtgctaggggttttgcgtggcaagtggcttcagaaacaaggaaagtaccactgttgcgattattcagttggctcaggcaggcggaggctgtgcttccacatcccacagggccctgtgtccccagagagcaggacacgtaggaatttgccatctcagtgcagtgcacaaggacagaagcaagggcagcaggggcagtcaggctgccggggcaaggggcaagcttctgtccaaagcagaaacactggctgggccttctttggtccagcaaacctggaccttggcaggaaaatgggtataacaacgacctcagctggcgcttgcgggaacccacgataggtgcagaccctcagaggtgcatggggtgtgactctccctccacctctgtccagaccccaacaatgggagagggtggcaggttttctgggtgggggataggaagccagcatccgagaacctgcccctggatggcaggaggctaggccacgtgaaagccgaggctccaagccccctgtgctggctccattgtcccatcagactcgacttacaaatcacaagtttcaatttgaaattcaatttcaaattttttttttttttcagatggagtctcgctctgtcacccaggctggagtacagtggcatgatttcagctcactgcaacctccgcttcccaggttcaagcgcttctcctgcctcagcctccagagtagctgggattaccggtacctgccaccatgcctgtctagtttttgtatttttagtagagagggggtttcaccatgttagccaggctggtcttgaactcctgacctcaggtgatccgcccaccttggcctcccaaagcgctgggattacaggcatgagccaccacgcctggccatatttttctttctctttttttatttttgagatggagtctcgctctgtcacccaggctggaatgcagtggcccaatcttggctcactgcaacctcctggtttcaagcgatcctcctgcctcagcctccaagtagctgggattacaggtgcccgccaccatgcccagctaatttttatatttttagtagagacagggtttcaccatattggccaagctggtcttgaacttccaacctcaagtgatctacctgcctcggcctcccaaagtgctgggattacaggcgtgagccactgtgctcagccaatttcaaatttttcaagataaaattaagaatttcacggccgggcctggtggctcatgcctgtaatgccagcactttgggaggccgaggtgggtggatcacgaggtcaggagttcgagaccagcctgaccaacatggtgaaaccccatctctactaaaaatacaaaaattaagctgggcgtggtggctcacgcctataatcccagcactttgggaggctgaggtgggtggatcatgaggtcaggagatcaagaccatcctggctaacacggtgaaaccccgtctctactaaaaatacaaaaacaattagccagaagtggtggcaggcgcctgtagtcccagctactcgggaggctgaggcaggagaatggcgtgaacccgggaggcggagcttgcagtgagccgagatcacaccactgcactccagcctgggcgacagagggagactccgtctcaaaaaaaaaaaaaaaaaaaattagccaggcgtggtggcgggcacctgtaatcccagctactcaggaggctgaagcaggagacttgcctgaatctgggaggcagaggttgcagtgagccgagatcgcacgactgcactccagcctgggcgacagggagacactctgtctcaccaaaaaaataaataaataaataataatttcaaggtgactgtagagcattaaacgcccaagcactgagtgtggggccctgcgtgacagccctgcccctgagtatctaatgtgtgcgttgacagccctgcccctgagtatctaatgtgtgcgtgacagccctgcccctgagtatctaatgtgactggctgttgtctcccgggatatcttccaagagacagaataacctggatctgaggataaatgccaggaggaagggagaatgtatccatggttcccatctccattagtcaaaggtacctctacagtgccttcacagcccaggcctcactgcgcctagcggctcctcagcgtttcaggctcagcagcagcagggacaccacaagtggccaggtacagcctggaacccctcccagggctggccctagaggcaggtaaagtgaggagcaccttagatggtgcataaaaagtgtccaatgcaagtgcctttcctgaggctgatcactgtacagtgattctgtaagaaaatgcccttatttttaggaaatgcacactaaggccaggcgcggtggctcacgcctgtaatcccagcactttgggaggccgaggtgggtggatcacttgaggcccagagttcaagaccagcctggccaacatggtgaaactccatctctactaaaaatacaaaaattagccgggtatggtggtgggtacctgtaatctcagctacataggaggctgaggcaggagaatcgcttgaacccaagaggtgaagttgcagtgagctgagatcgtacactgcactccaggctggcgacagagtgagattccgtctcaaaaaaaaattagcttggcgtggtggcataagtctgtagtcccagctgctcaggaggctgaggtgagaggattgcttgagcctcggagatcgaaggtgcagtgggctgtgatagcaccaccgcacgccaccctgggcaacagggccagaccctgtctcaaaaaataaataaataaataagtaaagaaagaaagaaacaaacacacatggaagtatttcgaggtaaagaggcatcacgcctgtgacttatgctgaaatgtcttagaaaaaaattgggagagggtactgtggctcgcacctgtaatcccagcactttgaaaggctgaggcaggaggattgtttgaggccaggagtttgagaccagcctgggcagcatagtgagactctgcctctacacacaaaaaaattagctggctgtggtgattcacacctgtagtcccagctattaagaggctgaggtgggaggatcgcttgagcttgggaagtcgaggctgcagtgagccttgatcacacccactgcacttcagcctgcaagactctgtctcaaaacaaaaaacaaaaaagaaagaaaaaaatgaggatagagggagagagagaaaattaatacaaatgtggtaaaatgttcacatttggggaatctgggtgaaggttatatgaacattctttgtagtatttttgcaacttttctgtaagcctgaaatgatttcaaaataaaaagttgggggtttttttgttttgtttttaagggtatgatgcaaccattattgctgggggagaaagtaccagcaaagagccagtcctgctggcggtaggtggatgggtgctgctgggaggactctgggttccacaggaggaacgtagcccagggaaaagggagttacgggactgcagcgccagctccccactcctgccaccattgggctccagctttccggccttgtggccagtctttccctttggggggccggtgactcagccacgggttccatgtggcaggaagtgggcacagtgactcacggggtggcttggtcccctcctttgtggaggccgggatagcagctcaggccccaggccagtgatggcctgtaagagaggaggatttgcaccccacagtggcaagccccaaggagggctgccctagatggtggggggcctggagcactcagctggggtgggggccccgcctcgccctcttggggccggcaaaatctaccctctgccagctctgaccacagcctgcagagttttccagccacttgtgggcatgtgcacagtgctggacactctgtaagaattccccactgtctgcaaagccggcaacagctgccaaggtctcccaccctgctggctgcccccagccatgcaccttctccggggggccttgttagcactcagcaggcatgcagaccgccaaaggctcagttccctggggcccagccgcttccaggctgttcaggctcaagttccactggttggtgccagtgacttgtctactgtctcatcggtaggctcaaaactaacacctttagaactgttcgtgattgaggctagatgcggtggctcacgcctgtagtctcagcactttgggaggccgagacaggtggatcagttgagctcaggagttagagagcagcctgggcaacacagtgagaccccatctctacaaaaaatattttaaaaaattagctgggcatggtggcgggcgcctatagtcccagctacttgggaggctgaggcaggagaatggcgtgaacccgggaggtggagcttgcagtgagccgaggtcacaccactgcactccagcctgggagacagagcaagactccatctaaaaaaaaaaaaaagaacaggtagtgaatgaaccctgctgcttaggggacgagactatgtccctcctctaagacgtcctgacctctgcaacttctcttctgcagactccaggagcacttagggccggggttgctccctttaacgttaaggccgtgctcacatttggtgggaggatgacccagtgcttgtacatctgctgtttcacatcctcacaacagagaaggaaactaaggctcagagaggttcaggaacttgcctgaggtcacacagcatgaagtggtgaagtcgggatttgaactcaggccttcctgactcccacgttggtcctgcccatatcccacctcaggatggctgtgctgtgcattttgacagttaatgggcgttcacctcgctggatggcaaatctggcaggctggccaggactgcggcctcctcactttctaaagccgtcctggcagcccctgacatatcaggagtgttcaggcatgactcacaagtggactgagtgcccgatgggttcaaatcctctgcaggtggctctgggcaaagcaccagcctctgcagcaaaccctgccccatcccagtggagcctcctgcccctccctcttacccccacggctccttgtcaacaaacactgggcagatcccttcctccactaccacgtgccggctcctgtctcccggattctcccttgcaggcctcgccgtctctctctggcctcccttttcctgatctgttcataactttcctcctcctgtgtgtttccctttgctcctctctctctttcttttctttttttctttttgtttttgtttttgttttgttctgtttttgagaccgagtcttgctctgttgcccaggctggagtgcagtggtgccatctcgactcactgcaacctctgcctcccggattcaagcgattctcctgcctcagttccctgagtagctagctgagattacaggtgcacgtcaccatgcccagttaatttttttttttttttttttgtatttttgtagagatggagtttcgccatgttggccaggctaaacttgaactcctgacctcaagtgatccgcccacctaggcctcccaaagtgctaggattacaggcgtgaaccactgcacccagcctgtttttgtttgtttggttttgagacagtctcgctctgttgcccaggctggagagcagtggcgtgatctccgcttactgcaacctccgcctcccaggttcaagcaattctcctgcctcagcctcctgagtacctgggattacaggcacccgccagcatacctgactaatgtttttgttgtttggccgggcacggtggctcacgcctgtaatcccagcactttgggaggctgaggcgggcggatcacgaggtcaggagatcgagaccatctctggccaacacagtgaaagctcatctctactaaaaatacaaaataattagctgggcgtggtggtgggcgcctgttgtcccagctactcgggaggcagaggcaggagaatggcgtgaacccggaaggcagagcttgcagtgagctgagatcgcgccactgcactccagtctgggtgacagagcgagactccgtctcaaaaaaaaaaaaaaatgtttttgttgtttgaaacggatttgctttgtcacccaggctggagtgcagtggcatgatcttggctcactgcaacctccgcctgcgaggctcaagtgatcctcatcttgactctctcatcttggcctcagcagcctaaggagggaccgcagatgctgggattaccgcacccggccctctttctctctttcgagttccctttctgctcccccttggccttccctcgatccccttcctcctctgtgttgtcatcaggctgctgttacgagtccaatgtggtccccctcctgtgtgccagtgctgggtccacccctactgacggcacctgcaggacgagggtcaccactttgctgggtcacttcccatttcctctgtgcttccaatgagctggtggggatcctggggttgtcccatccagcgtccctagtggtacctcccgaagtctggtgtttttgagtggacggccccgggggttcagagtgactcttcctcacctggtctgtgtgatgaggcagtgaacaccccaggggagaggctctttggaggctggaaaagatgcccctctgagaatccggtacttggagggctcttggtgaatgatgtttttcttttccgtcactgtactgagttgaaatcggcctcctggaaagttatttccctgtgttctttgatctgggtgagggaagccatctccctgactagctgacagtcacttgatcgtcaactagctggtgaacctcgtcatagcttctctctctcctgtaaataacctgggttccatcagctgctcccacggctctgagcctcagacccctttccctgcctttctgtcctcctcgaaggccccccagtcctgagacatctgggtaacctgattgctggactcgattttcaatcctgttcaatttcatctgagtcgttcaacctgtgggtctagcctatcatccttctgggggttactctccagtgttatctgcaaatccaatcacatcatggtcttcattcaagtcattgataaaaacgttaactaggacatggtctaggtcacagccctgtggcacatctctggagacttacttctagatgagcactggtttacttatcaacggccttttgttttgtttttagtgaatctttctacctgccaccgccgcattaaactgttttctaggctactttgtttcctgtcttgtgtaaggctatcacaggaagttgaatgttctgtgaaatcaaggtattctatacccatagcatttccatgatctgaaaatcttgtcaaaggaaaaaggagttacttaggccagaggtgcaaatagggttttgttttgtttttacctttgaaaaaatgatgatttgtatattcctgcatttgttttatgaaaataccaaaatacagataaaggaaaaaagaatctgaaagcattctaaaaccctctatgcagagataagcacttcaaacattttggtatgtatttctggaagtttcttttttttttttttttttttttgagatggagtttcgctctttcgcccaggctggagtgaagtggcgcaatctcggctcactgcaacctctgccccccgggttcaagcgattctcctgcctcagcctcccgagtacctgggactacaggtgtgtgccatacacctggctaatttttgtatttttagtagagatgaggtttcataatgttggccaggttggtctcaaactcctgacctcaggtgatccacctgcctcggccacccagagtgctaggagtgagccactgcagactgccatttctggaaatttctaaaagcatctcgaactacatataccaaaaactcataaaaatgcaatcagtctctaaatactcttttgttatctgcttttctcatttactcatatttcatgactatcttcacatgtgattgaatatatatatgtacagctacataaactgtttctattagctgggtggtattgcattatgtggacatatcctattcaacagatcccatattactggattccatttttttgtctttataagcattgttatatatgcctgttatgaacatgtctggctccttccctgaaatacgttcagatgctatagtcagcctttttctaactattcaagacctatttctcccttgaatccctgtagctttttttttttatctgtgcttttttggtaagcatattttccactacaataattatgtcctgtcgctggccaggtgcagtagcacgcctgtaatcccatcactttgggaggctgaggcgggcagatcacgaggtcaggagatcaagaccatcctggctaacagggcgaaaccccatctctactaaaaaaaaatacaaaaaaattagccgggcatggtggcaggcgccaccagtagctcccagctactcgggaggctgaggcaagagaatggcgtcaacctgggaggaggagcttgcagtgagccgagatcatgctactgcactccagcctgggtgacagagcgagactccgtctcaaaaaaaataaataaatgaaataaataaaataaaattaattatgtcctgtcatctccctgcttgtagctactaagatcccttaggaaagatcccatcctgatttaagattgcatccctaatacctataacacaataacttgcacttacggacatgccatagatatttgttgactaagggcaagaatatatgaatttgtttagtgattcactgcagtgttttgtgggtgagtaacatagtcgtgagtttctagtttccccagtctagtttctggcccacagtggccttgtttgtcatctttctgtccctctcctcatctcaggccaagggtgaaagccagcaagagtccggggctggcatctacccagacagcgtctcactctgctgcccagcccactttcaagtcaatgtggagcttcccagctcgccctccccatcctggatttcagatccctcctaccctcaccctactttctctcggagtttgacaggggagcaggtagaacctggggcagatctgcattcccctgggagatgcttcaagcagtggcagggtcttagcctctgagctgctccctggtaggaaggaagcaactgcccctggtctgtgttgggagatggacagagctttaggatggacaggcgttggggatgcaccagtacacataggcgctcaataacggtggtctttattctctttcctcttctgtcatctgacacgattcggtcttctcagctaaggactgggtctgtccttcgctcgtccttgtagccgtgactacaaccttccaagccatttttgttttcttagaggttttattgggagctgagggttaatagcaccccagcccctcccatcaggctcaaggggctcttttgccttcacttgtggttgagagtcctccctccctcctgccctcttctctgtccttttgaaatatgagctcagctccctagaaggtatcagtgctttattttgtacccctaccaactttctttctctttttttttttttcgagacggagtttcactgttgtcgcccaggctagaatgcaatggcgtgatctcggctcactgcagcctccacctcctgggttcaagcaattctcctgcctcagcctcccgagtagctgggattacaggcgtgcaccaccatacccagctaattttttctatttttagtagagacggggtttctccaggttgctcaggctggtgtcgaactcctgacctcaggtgatccacccgcctgggcctcccaaagtgctgggattacaggcatgagccaccatgcctggcctctttctcatagaaatcttttgtgattgaattgtctgaattgtggattttttttggtctaccttaccattttcctttttagaacctacagctttctttttttggccagcatttctttttggagaaatttcccctaaagtatagggtacctatgtgataatttccagtatctcttcctgagctattataaactcacagggaatcatcctgtatgaagagtgaccccacaatgaaattcctttcctggggttcaaacaatagacttaaaaaaaaatttaagacacagggtcttaggtcgggcatggtggctcacgcctgtaatcccagctactagggaggctgaggcaggagaaccacttgatggaggttgcagtgagtagagatgaagccactgcactccagcctgggtgacaaagccagaccccatctggccagaccgccatcgggagatggaggttgtagtgagccgagatcctgccactgcactccagcctgggctacagagccagatcccatcccgccccacccccccaaaaaaagagagagaaagacagagagacagggtctggctctgtcacccaggctacagtggattgacttgatcgtagctcactcactgcagccttgaagtcctgggctcaagtgatcctcctgcctcggcctcctgagtacctggaactacaggcaccagccggtgtgccctgctcaagcagtagactttcccttggaataaagaccattataatcccctccaccaactctcgcaaagccatagtttgccagagccattactgaactttttgacaaggcaatcagctcaaatgcacccaaacaggttcgggattcctgaactcagcccaggcttcattgatgatacctaacacgcctgactctataagcggctgacttttaaaataataacttttttttttttctttttgagatggagtctcactctgttgctcaggctggagcgtaatggcatgatctcaggctcactgcaacctcctcctcttgggttcaagtgattctcctgcttcagcctcccaaatagctgggattacaggcgcccaccactatgcacagctaatcttttgtataaaataatgacttttaaaataatccaatacaataagatctattaagcacctagtacataactatgaaccagggattggggagagaaaggaggaaggagatttgatctcaccctcgaagggtttagaatctctccactaagatttttaggagttagagttggaaacttcacaatctaaagtgaagaaagacgaacagggtaaaactcaagacagtttttgtaaaaagaaatgtaaaactgtttgccttcctgtttcttcgtcagggataagtaatttccagtcatcccatccattaaacaaatatgtattaagaaagaaaaacagtccaggagcctactgcgggcacaaccggggtgcacagaacccatctcgggaggctggctctgccccttgagaaagttcaagatgaaggggatgccaaggccagaggcaaatgtccagccctcactagcggggatcacctcgagttccacgcgaggggctcagggttgggtaatcgagagtggaaagctctggaaaaaccctaatacccctgttgcaacattctaggaaaatggtctgtctattgaataagagtgagtcaccatgggaaagttggggcggtcaacactaccccgcactgctcatccccattctttggctcctagtgatgctccggtcaccctctgggggccatggggaggaggcagtgacgccgtgatccggaatttcaacgagacatatgcaaatggcccaatgggctgtgaaggaagttcagagacaggaggatgaggcagctcagtgtttctaacccacaaagcagaagtgagaatgggtgagaattcccagtcaccttccccttctcctttcccttctcactctaccccaaccctactccctgtgtgggccctctgccccttccctgttcagaaatgagatcactgggtgggtgcagtggctcatgcctgtaatcccagcacttcagaaggccgaagccggaggatcacttaaggccaggagttcaagaccagcctgggcaacatagtgagacccccgtctctgcaaaaaaattaaaatcagccaggcgtggtagtgcacacctgtggttctagctacttgagaggctgaggttgggggatcacttgaactcaggaggttgagactgcagtgagctatgatcacaccattgcactccagcctgggtgacaaagtgagaccctgtctcttttttgcttgagatggagtcttgctctgtcgcccaggctggagtgcagtggctcaatcttggctcactgcaacttccgcctcccgggttcaagcaattctcctgcctcagatctccccagtggctgggactacagatgcaagccaccacgcctggctaatttttgtaattttagtagagatggggtttcaccatgttggccaggctggtcttgaacaggtgatccacctgcctcagcctcccaaattcctgggattacaagcatgagccaccatgtccagctgaccctgtctcttaaaaaagaaattgagatctctgacttttacccaattacccaagtctgtcaaagtacccatctgtaaaagaaaccagccttgtaaggttcctttcaactccagaattgaggagtgggtttgggggcagtcagaggggggtgctggtgagcaggtgacaggagaaggaagaatctccagttgagcccccactatgtgtcaggccaggaacccagggacctcaccagagccctctgtagaggtcagcatcctcgttttacagatgacacaatgacagcctagtcggaggatgatgacaccaggatctgacccagtcttcccaggctcccccccccaactggaagccccccaagattgagcagacatattctttcaggaaacaccaccactctggtttatttcagctgcaggtctgatctccataacagaagcacacctgaaaaatactgccttagccgctgaattttgatagagcaattctatattcctggtaacttcctctgtaattaatcgtcaattgattactccgtcacttacatgtgagtgtgaaggcgctggcttctttgtcaggaagtgaactctctattgacgaatgagtcaaagcactgggcggctgttacttattcatgaaggagggcattggcgcgtttaggtttcccctcacctgtccagcacgccctgaaagattgtagtacagagtcctggggagaaagtggtttcctgcctctccctgggctcatatttgaatggtactttctttctctctctctcagcagactaggctcctctcagcagatttccatcccaagtttgggtagctcttgccaaaccttttaacccgtattctacagcaataatccaagttataaataaaactattcaattcagctatctagttaattaaagaattagtagccacttgtggataatatttatttttctgggcagtgaactgagttagttggactgggcatggggatgagttcaatattttattaattttccttgaggatagctatatatttagtacacatgtaatacaatgtattagtgtgataactttttttttttttttttttgagatggagtctcactctgtcacccaggctggagtgcagtggcacgatctcagcttactgcaacctctgcctcctgggttcaagcaattctcatgcctcagcctcctgagtagctgggactacaggtggaccccaccatgcctggctaatttttgtatttttagtagagatggggtttcaccatgttggccagactggtctcaaactcatggcttcatgtgatcctcccacctctgcctcccaaagtgctgaaattacaggcaacagccacctcgctcagtcaactttctttaaaaaggaaggatgactgggcacagtggctcatgcctgtaatcacagcactttaggaggctaaggcgggaggatggcttgagcccaggagttcgagaccagtgtaagcaacatagggagaccccccccccacccccaccgtctctacaaaaaaatagaaaaattagccaggtgtggtggcacatgcctgtagtcccagctattcaggaggttgcggcaggaggatccattgagcctagggggcaggggctgcaatgagctatgatcatgccactgcactccagcctgggtgacagaaggagaccctgcctcaaaaacaaaaggaagctaaggggtgtaaactgcctggggaagactctctggggtcatagagagtgggtttaggatctgggggacattctctgtggccagtcagtcagggtgctggcctgactgctcaacaagcttcttaatgactctaaacctcagattcttcgtttgaaaaccaggcagatgagctcagagaactgctgtgtggattccccctcccagttccagtgtggcagagtcctggcaagatagagtctacctagagctgctcagaaatgcagcatctcatggcccaccccagccagatgaatcagtctgcagtttaacaagatccaggtgattggtgctgacgtgaaagtttgagaggccaggctaaataacatgacatatgtaaaacacctggcagagagtgggcatggatgggcgtcagctgccctcctcctctcccccgagcatcctcagacaccatcccagggagatcttttgcttgggagggagagatgtgggttggattgtgggtgaaatgtgggcgacctgcattctcatggtgcagcacatattttgtctccttgcaatcattgatgtgggccagactgcaaagtgtggcccctaggagttcagcatatggtcctaaggttacagggtgaacccaaggcgaccagggccacgtatgcaagtacccacagcttcttccaccaagccgccaccacccgtggatgtggtcactcactctggtggggcaagggggcaagagggcagctggacctctagtcctcatatgggtttgctggttgtatgtaaaaagccccttaggggctggtgtccgcaatgtgatactgaatgtgatggtttaacagctttcatgacacacccattttggaagcagccatcctgtgctgggcactgcggattcaacacagaccaaatggacccatggcaggaaggtcgttagagttaggatgggcagagaagtagcacatggggacaagggctgaacccaggtcagcacagggtgttgggaagaccaccctagaaaggaagtgggggccgggcgcggtggctcatgcctgtaatcccagcactttgggaggccgaggcaggccgatcacttgaggtcaggagttcgaaaccaccctaccctggtcaacatggtgaaaccccatctctactaaaaatacaaaaactagccaggtatggtggcgcgtgcctgtagtcccagctacccgggaagctgaggcaggagaatcgcctgaaccggggaggtagaggttgcagtgagctgagatagtgccactgcactccagcctgggcaacagagcgaggccctgtctaaaaaaaaaataataaataaaataaaataaaataaatcaagaaaaagaaggaagtggggcccagggcggacaggctcagggcaaggcacctgcccggagggcactggggtagggcaccggatggccttagcctctggacattctcagcgacctggcactagggaatgttcctggcctaaggaaggacctgggtctggccaaaaaggcgagagagctaggcgcggcctgggaggaaggtgcggcgctggggagggaggggagccctgccctggtgtgccctcggtcccgcgccgcacaccctgccgggaagcccggggccgcagctgctcgggcggcccggcccagaatagcctcccttccgggcagggctgccccggcccgcagcgccagcgcccgaaatagggctcggccgggtggcgggcgccaggggccgccccagctgcaggactcgccggggagccggggcccgcgcgtggaccgggaggggctgcggggtgcgggcccggccctgggacgcgaggacccgggtgggcgggtccgcgggcggggtgggggcggggcgcggggccgggaccgggatcccgggcgcggggccagcccgaggcgggtggagccgggcgctgacctcacagcccgcgaggaagcccgtcggggccggcggggctgatggaaggcctgaggaattcgcagccggcggcgcggccgggcgcgttcccttcccctctctccgttgcccggcgagggagccacagcgcagcggttgccatggccacgggccgggcgtggggctgggggaccaggggccgctgagcctcgatcaccttgtcctgctcgagccaggttggcatggactggaagaaccccgcggcggcgggcgggaggtgctggggccaggggaggccccgagggaccccgccgcccggtctgcgccctgatcccgcagggtcctgtggaaatgcggtgtctgcctccccgcctcctgcgctcacacatgcaggcctggggcctgcgggtcccggggctctgagcctgcacagcccacgggccgcagccgcaggccccgcactggtagcttaggtggacacggaggctgagggggagtttccaaggggcctggcctcacgctctgcccgtcacagccgccacccctcaccggccctccacccacccctaactccttaacctctcccggcctcggtttcctcacctattaactagagattagtcatagctaccatccaggcttgttatattaaaatagaataattatgtaatgtgccgtgtgcactccaaacgcggtcctctttccctgtcccacacctccttcctcctgcatcaggcctggggaggggggcgtgccgatgtcacccccaacccccaggcctagagtcctggacacatggacgcccctgccagagctcccctccccgcgcttggggttactttgaaccccgcctcctacaagaggatggtccagcctattgtcggaacctgcaggaatcccaggctgcgacccaagaatattagcggaggcccagcctggctggggtgagtcagcctctcctcccaaattcagttgcggcttcagctgccctgtgcagctggggctgctaagttgccagcaagaggcagcctctgaaaatctctggaaagaccagcatgtccttggggtgggattcagagcacagtggggtgggggagggttgagaaggggtcttgatcccccttctcttcctctaggggagccgaggcttgggaccagggaagcagcggtaccccatgtggggaagggcgggcctgacttactgtaacttcctggcccaaagcctgattgtcctgtggttgggctgcccggccagagaggcccctggtgtagggaggactcagagagaacttgcctcccgttgccagggcccagtgtgtgtgtactggggggcggaggggctgtgctgtcactgatttcctgagacagctagtagaccagatgaggctgcctggaaggtggctcctcttccctaagcaggttgggccactacctaaatgccaggttatttacaagaaaaaaaaaaggctgtccaggggctcagccccttttggagggcatcagagccgccagtgttgactgagcactcaccatgtactacgccatatgggcgtttgctcactgaactgtcacaaccacccaagaaaacgggaactgttgttatccccattgtacagatggggagcggatttagagtcctgggatgcaaactgggtttccccgctggctcccgatccccactccatctggcctatgagcgtgggaaccagtgtggcccggaagagtggtggatggcccagctgactgcccaggtgcccccaccccccagccacatgggcatgcggcttgctcggtactcagctgacttcctgtccctggaagagcagctgccggtatgctggggcagggcggtccccttcctgtggttcaggtaagggcataaccccatgccttcttggcatcctccctctctcctttctcaggctctgcaagtccgacctgggtgccccagagagctgctccgggaaagacgtttacctgctgcccagagctgggactgcagaccctgattggcgagggcttggagagtagctgagaaccttcccttcagctactgaagaccagacagggctttctgtatcacgctgcctgacgatgatgagggtgcagtgactaagagtgcagatgaaaggcccagctctccaaccaggtggatggatttgcaaggagcttctatctgggcgtggtggctcatgcctgtaatcccagcactttgggaggctgaggcgagcgaaccacctgagggtgggagttcaagaccagcctgaccaacatggagaaaccccatctctactaaaaatacaaaattagccgggcatggtggcaggcacctgtaatcccagctactcgggaggctgaggcaggagaatcgcttgaacccgggaggcggaggttgcagtgagccaagatcgtgccattgcactccagcctgggcgacagagtgagactccatttcaaaaaaaaaaaaaaaaaagaaaggagcttctgagagatggggtctccacctccccatcagatactccagggctttggaaagagctggctggctcttgggcatcacctcaactttcccctaggtgacgctgccaaggaactgtggcactgtccctacttcccacatccagctccacggttccacctcccaccccccttgcctgtggaagctcaaaataagctttctagagcatgatgtttcttgtgtgaggggtcatctgaggttgtaaagactgaagctcttcaccagagaaacgcaggaagcatcccgcagctaagtgaggcaatgtctggggcacgccaggccacgccaggtagctcagaggggaggaacgcccctggctacacagcctgcgtctgagccctgctggtggccaggccatctgctgggctccatccctgggcgtctttccagcctgtcttcagtgctcagggcgtctttagcagagcataaagtggcatttcacttgtccctctacccaacagcaaggaagtggacctctcttaggcttttcttggaagacgaaaggaaagaaagaacgttctcaatgtgagatcctacaggaccactgtactgggtcgaatggcgtccccccccaccaaattcatgtctgcatggaacctacaaatgtgactttgtttggaaagagggtctttgcagatgtaattaagatgtactccacaggcctggggagatcaaggctaacagcatgttgtatgaggatggccccagtccaatgactgatgcccttatatgagggaaatctggacacagacacacagagaaggccacgcggtggtggaggcagagatgggagagatgtgtctacaagccaaggagcgagcaggaccgccggccaccaccaggagctggcaggggcaaggaagtcattcttccctgggggcttcagagggagcacggtcccagtacaccttgagtgttggccttctggcctccagagctgtgagagaatccattttggttgtttgaagctgctgagtttgtggcgttttgttacggctgtcccaggaaaggaatacaatcaccaaatgtcaaacacagggcagctgggaaaaacaagagggaaatgcatgaggcacgtaaagaaaagacttggaagagaccaaggagggacaggaaggaatgcttcctcaacttcctcctcgcacccggacaggaagccggagacctagtggctgagccttggaagaagcggctacctattcccccccacaagagcgggtgagcttggatgtcggatgaatgagaagggtctgaatcttgctgggtcccagggagaccctgttaataataacaaactcaagatatggtctcgtctcatcctcaccacagtgcctaaagcaggttttattgaaatccccgtgtatagattaggaacaaggcagggcggttgggtgcctgcccagggtcataggcagcagcagtgatctggaactggagcccagctttcccacaccctgcccttaccacttgtcctctcctgatccagggctccagtgcccatgtccagtgccttggtggggctgggccaagaggcacagcgagggccctggccacaggcaggggcgttggagccctgctgcctaggtttggatcccagctctactcctggtgagctgtgtgaccttgggcaagttacattacatccctgttttgcagtttcacccactgagaaaatagggacaagaatagtacgtaactcatggagttgctggagacctccatgggtcagtacgtttcaggtgcttagaatagtgcttggcacactggaagcacagccataaaagtgttgtgaaataaataaaacccgctgggcgagagaactctttctttcatagctggggccaaggagagggcttcaggatggtgacctgtcttattcttactccacagacatggagatatcaaggccaatagcattctcatgcagttctcttctatttcccatagaaccctcaagaccagcaagggggacacctgagagcagaaagcagagttgcacccacattctgggcaggctgactcagttgctagaatcctgcctctagggccaagattactgtttgatcctgatctgggccagctttgtcctactggaggaaagcttggaaccctgaatcctacttggttggtctcctgcttggctgttttgctcacagtgggaacctggtctggggtgattcactatcactcatcgctccacagaaggatggtgcccggtgcacatccccaggatagtgttaaccgtcacctttacgcatggcactcagaatgcgcagagtggtgtgtgcatgcagcaacgtgtatacaccctgtgcatctgggaggtcctccagtcatctctggccgcgtcctgcggagggtgctgcagcctctacctggcctctggctctttctttcctttcctttctttctttccttctttctcttcctttctcttcctttcctttctttcctttctttcctttctctttcctttctttccttcctttcttccttccttccttccctttcttctttcttttctttccttcctttccttcttccttcctttctttctttttcttctttctttctctctctctttctttctttctctctctctttctagagtcttgctctgtcaccacgctggagtgcagtggagtgatctcggctcattgcaacctctgcgacccagcttcaagcgattctcctgcctcagtctcccaagtagctgggactataggcatgcaccaccacaaacagttaattttttttgtatttttagtagagatggggtttcaccatgttggccaggctggtcttgaactcctgacctcaggtgatcccccccaccttggcctcccaaagtgctgggattacagaggtggctcttttaattgactcctctccaggcatctctccttccagccacagagcctggcctgatggtcccagggccccagggccccaggtgaaggcctctctcctcccccactcaggtctgaccagctctgtttccatcctggtgtgggcacaaggtctcttgctgcagctgggccagtttgctgaccttctcagctccttctcttagactggagaggcctggaagggtgcccgagggagggtctgggctgctctcctgggctcctcccctccactccaggactctggctggagcctggtcagggtccttactgagttctcagccaagcgccagccctgtgatggcctgaggggtctggtggggaagccccaaagtgagggctccatagccctcactgtccctcccccagcattgtgcagtgccggcggtctctgagttcttctgggtagcctttctaccacatcctcttgcctactttcaccaggtggccaagggacactaaaaaaggcagtgaatagctagaggaccactcttgaaaatcagcctgccttcctcctggtgccagctcctgtccctccggcctccttttcatagaattctacaacaggaggaaacagagaggtcatctcctccaccttcaccaagtttccagaacggatgggttagagggatctggcgttctctgaggcttcgggccaaaccttggacattgggctggccagagatcttgctggggttgccttgggaattgtatatccattgggagcactagccctgaacacctggggctccccacctgctaggagctgggaggactctggtgttccctgcaaccccccagggtctgggtggacggaatggcagcccaggactgttccccaggctgacctggactctgatgagagccaagagtggacctagctgtcatttagatccctgggggagccttcacagtagctgccaagcagaggtcctggcactggggagggttctcacacgtaggaggggcagtacttaagcaagtaacagtggagagggcactggatttgacatcagctgagaggtggtccgtttctgcttctctcactgcttatctgtgatctgaggcaagcctaaactcctctacagcttagtttactcatctggaaagtgtggtatattttattttacctgccttacatctgaggcatggaggaaggacggaatgagatcacctattaaaatgcattttgaaaaaacaaaagtgctatttatgcaaacacatggtactaaaaataaaagatgcctgtttgcttctggaagtaaaagttgtgaatgatgccgggcgctgtggctcacacctgtaatcccagcactttgggaggtcaaggcgggtggatcacaaggtcgagagatcgagaccaacctggccgacatggggaaaccccatctctactaaaaataccaaaaaaattagctgagcacggtggcacacgcctgtagtcccagctactcaggaggctgaggcaggagaatcacttgaacccgggaggcggaggttgcagtgagccgagattgcgccattgcactcctgcactccagcctggtgacagagcgagaccatccgtctcaaaaaaaaaaaaaaaaaaaagttatgaattaagtgatattttaatgatccaggaaccccattatttaaagaacattttgtcttttgtacagccacagagccagtgtttgatgagtttccagcaagcatcacccattctgctagattttgtgaggaacataaaaaagcagaagatatagggcctggtacggagttggcattcaattaataatcattgggcagggcacggtggctcagacctgtgttcccagcactttgggaggctgaggtgggtggatcacctgaggccaagagttcaagaccggcctggccaccatggtcaaaccccatctctactaaaagtacaaaaattagccgggcctggtggcacatggcggtagtcccagctactcgggaggctgaggcaggtgaattgcttgagcctgggaggcagaagttgcagtgagccaagatcatgccactgcactccagcctgggcgacacagtgagactctgtctcaaaatatatatatatattaataatcattggatgaataagagcgaatttcttccatctgagagttcacagtccagtttggacggggacagtcatgtgaccgggtgatgaatgagtggtgcaggctgtacatataatatgcatttggagggaggagaggtctccagggtgtgggaggcttcagggaggaggcaggaagggagaaatcctcagcagagagggagaactagaagagagaattggaggggctggctgggaagaagggctaaccccaacatgggctcctaatcccaagtgagcagggaagtgatgaatatggtgggcagggaagaagaccaccctgatgggaagaagtttgcctcctagcgtggggtggagtgggggcagagtaaacttcccactggggctacagttgaagggttttggaaacccagcttagtggaaaatgccagggggaaccagtatagatcctacagggatgggctgcctgtgtgcatgacatcatgaaagcaatatttttagaagatgagtctggcatggatgggcccatggggacataccaaacttcttgaagttccccaaagtttcccttttccgggctatttccctgtttctgagaatgccccattctcccaagcctgtggaaggaacacctgctgtttcaccttaacttacgcatcacctcttctgggaagccactagaggtcatttcctcctgggcacccccagctgtaccctgtctaccactttatttttacacccattcctttttaggatacttcttggttttcacatctggttcccctttcagactgtgagtctcttgaagcctggaatatttcctgattgttatttttgtccagcaacaggcatggtggccagagccgtgtttccacctatgttggtatcacctggggcacctgggtcccaggtgacacctgggtcaggcaaacatcaggtgctgctgatacaccctaaagtttaggaacactgcagctccacctctctcacatggcctcataggacaacatctacaaagagcatatcatgatataaacagcaccccctggagttgtgcagcacagacacctcctggaggacccaggtcctcatggattcagttttttttttttcactttattttctttctctctctttctccttccttcccttctcttcctcccttcttccttccttccttccttcctttctctctctctttctttcttggtgtgtcactctgtgactcaggctggagtgcagtggcaccatctgggctctctgcaacttctgccttctgggttcaagcgattctcctgcctcagcctcccgagtagctgggattacaggcgccgccaccacacccggctaatttttgtattttttgtagagatggggttttgccatgttggccaggctggtctcaaactcctgacctcgagtgatccgtccacctcggcctcccaaagtgctgggattacaggcgtgagccaccatgcccagccggatttaatttttcatgtctgtaccttcaacattctgtacattacaggcgctaaataacattttctgtaggaaaatactatgattggagatttgggggaggggaggtgaaagagaggaaatatatcgtcttgtgtaatgtaaataatgagcttgcattctgttttttattttttttgttatttttttttaaatttttttttttgagccgggcgcggtggctcacgcctggctgttttttatttatttttattttttatatctgggtttgcagtctcttcctgaggctgggcctgaatagtgctgtgaataccggcagtgatggtgttaactggaagagcccaacgtcttagcattcagaaccctaatttcttttctgaaaaaaagcctgaagcctacaacccagtgttccagcctgcagcgcagccttccttccaggctgcatcccagccttccagcctgcagcccagccttccaggccgctactgttgcttaaggctgtgctgcaatcagagcgctcaggagtgggaagtccagagttctacccgcttctgggaacagccccccatccccctcccggcaccagcttccacaggcaagtcctcatgacagtgggtcaggctcacccgaggatttcacaaacgcctggcctgttcccagcacagcacagctgggagggctcagtgccggggggaaggagcatcctcctcctcctcttcccttggccctgccgtcctccagctcagggagagggaagggctgcacttgtccatgcttgccgcctacaggcccgcgagctcggaaccttccctccctgctgatttcccagctttggcttagtcaaggtacaaagaggaaatgcgctgtctcacgacaaaaggagcatccaggcttgtctgccctgaaggcagctgcaagaggtctcagagtcacctgaggaggcggttattcagattccaaggctgtcttcaggctttggattcagaagagctgggtcacagtccgggagtcagcagtttcatgcacacctcgggggactggccgtaggtggtcctctgtgctttcagaggccttgaggggcagagaggtggagctccaggcaatgaaaagcgtttagctcatagaacccaggattctaagttagggccaccagctctttctctagctccatgacaaggaaagagctgtccttggatttggggcctcagtttctccatctctgaaatgggtgtgttcggacctgagggtacagagaccaactgtcctagtttgccagactttcagaactaaactgggacaagctggccaccctactgagggtggatgcatgctgtaatgggaatgtgatttgaagatgcgtcttcaaggcacaggctatatttatttaatttacatatttacccgttattgtctggttgctcccacttaacctctggagggcagggtgagcagggccttgtcttgctggatatagaacagtccttgaccgtgggatgtgttccacagagatttgctgaatgaatgaacgagtgaatgaatgagtgactagaaggggagagggctgaggctccaagaacaggctccctgaatagagcgtgtgttgggggtgggtttgctccgctgacctgaagggggttctcggctcccctgggacaagaaaacttgacccactcacggccgggaaagagtccaggctttctgagcagccgcccctgggaggggtcagtgacccccggtgacgaacgcctgactccccccttcccccacgcgcccagcgcggcctggtccaccctgtctcctccctctcccgccccccaccccagggaggtgcgcctggcagcctcccggccgaatttcctggcactgggctgagaataaacagcgctctccgcccgtaatcccgttgccccggcgaccgcgctccgcgggcgggggcgtggcgggggcgtggcgggggcgtggcgtggcggggccgtacccgaggcgcaagctctgcagggcgcagcggcggctgcggccgcggcgatgcgggcccgggaggtgccaccccccgtactcggcgcggacattcttcgcatagctccgccagggctcccgcggtgtccgggaagtgactcttcctggcagagggcggcctcgaggcgacgcgcctgcccgcccgccagcccggcggccgccagatctggaggggagtgggggcggggcgcaagaaggtgctcccagccctggggctcctgtcaccctcggcctcgatcatcccgccccgcgctcctgggaccggagtcccttactcccatagactctcgactgcctctccgcccaacccccgcccggtacccttgcggtgccccctcccaaacatccttactcattcctaagactaggacacatcgtgcaggctgattttccatcgctggctcccctgtctgaggcctccttccccccctcccccagagcaggacttagatttcccattcttggctctagcctcaggaggcctgccctaaaacagcaccaccggagagaggatagggcctcttggggtggagtcttacagctctagaagcaaggtaatagggcacagggctgggagcggggatttctcccctttctgttggccggggaccctcagccttgtttttaaccaggccgaggcacgagtgcctgcccaagccaggagaagctgcccactgcctgcaggacacttgtcagcacatctgggagccaggaatacccctcctcccccagccaggccagagggcccccgactaagtcccttagaggagggtgtcttcccttctgaggattgagaagtgcagaaagacttctgttatggggtatgggatgaggagagaagggagccggtgctgagcagagtcatctgggggagagattctttcctggccttcccagcagcttgttgtgtgggcttgagcatgttgcttcccttctctgggtctcggtttccttgtctgcaaacccaaagggttggtccagtctgatctgaaatggaaagacacaccaggcgcggtggctcacgcatgaaatcccagcgctttaagaggacgaggtgggcggattgcttgagcttgggagttagagaccagcctgggcaacatagcaagatcccatctctacaagtagtacaaaatttagccaggtgtggtggtgtgtgcctgtagtcccacctactcaagaggctgaggtgggaggatcgcttgtattctggcagttgaggctgcagtgagttgtgatcctgccactgcactccagcctgggtgacagagctagaccctatctgaaaaaaaaaaaaaaaaaaagaagaagaagaagaagtggaaagacagaggaaggttgggatgggcagtggtctggaggagggaaatgagtcttcttgcctttgcaactccacaaaaccaagtttcaacctccctggggtgggcagggagaactacttcctccctggccagagaagatcaaattcttttgctagcattctgtgaacactggacaacctggctaaacagctgccttctgggtcaagcacagggacccagtggctgggcacagtggctcatgcctgtaatcccagcactttgggaggctgaggctggcagattgcttgagttcaggagttcgagaccagcctgggcaacatggcgagaccctgtctctacgaaatatacaaaaaaaaaattaaaaattaaaaataactggccgtggtgataatgtgcctgtagtcccagctactcaggaggctgacgtgggaggattacccagacgtgggaggtttacccaaacccgggagttcaaacctgcagtgagctataatagcgccactgcactccaacctgggtgacagagtgagaccctgtctcaaaaaacaaaaaagtacaaggaccccaggttcacggttccctcatggctgttattccagtgaaaggggaactctgtgcagctgaaggcagtggtggctgaccagcagaccccagggcgaggaagactcatcatccttctggaaggcactggggagccacaccccactgggccccctcacctgcacttgtgctttgggaaggtggccctacctgggtttacattgccagtctggagttccttcatgatgcctgtggtgtggctcccatatgctctgtcccctcagccgcctcgtgcctggcctggccccttctcgtcacttcaggtcattttctccaaaagtcccaggaaataggaaagaaaaacgactttgtttatttactctctgttgccttttggaccccgattcctggagcagtatattgggtgcaagggggccaggaagaggctctggtatttgtgtcatctgagagagataagggcccctgacttggggttaacactcatttcccagctgtcaggtcacggggatcagagaaggaggcatgaaaggagaatacctcagagaaggtggttttgtttttgtttttggtttctgttttttaaatggagacagggtctcgctatattgcccaggctggtcttgaacttctgggctccagcccttagcccacctcgacctcccaaagtgctggattacaggagagaagacgttttttgctattagaagaaccctagtgctgaaaccccagagttggggggaagggtactaacctcttggcttttaaggagggactcactccgggggcaggtatatgctgagtgtatagagaggcagagaggcatgggctttggaaatcaaatgctcctgggttccaatcctgttttccccatattcccaagtggtgtgcccttggccaggttgcttaacctccctgaacctgagttgctgcccctacttagttgacaaatatttactgagcaccaatctaggcaccagaagtgaccagtccaagtcctggctcacatggggcacgtggccatgtctgagaacatggggatgagaatgcctgccttgtgggagcaggtgggatgcttaatccaggtaacctctaagtgccccttagtgtttaaatgagagtgactaaaaatagatgggctgaggggaggataccttcagcccgggagctggagaccagcctgggcaacatagcgaaccctgtttcaaaaaaagagagagatgaatagatgggtgctttttgggaggagggtgatcctgtccgctgctcaggttggggcccctaggaacggggaagggaagcaggcatggggagcagtggccaggaagcccctgaatgcctggggtcctgtggtgggggagggggtggggctccacctgcatgcaagatttgcttcaggaccacccctccccccacttccagtgaacctggctagactgaggtcataggtcaccactaggaccccatgtctgggctttctcggaacgactccctgccaaggaaccagagcgcctctaatagcctggagcctctaaaagctttgaccacagctcagcttgctccctgcaagccctttgaagcgcttccttcgaacttgctttgcatattctggtcagatctgaatcagacttgcaggaattacccctctcggtaagtctaggtggctgccttagcttgtcagtgacacacgaggcaggcgtgctgacgtaaggctgagacgtattcgattccaccctctgcggctctcttcctcctctccgatgcagagtgtgggtgtgggtgaaagagaaagcaaggcacggggcggggggcgggggggcaggggtgcagaaaaggctcaagtcatgtttttcattaaaaaatagtgctctttattataaattactgaaatgtttcttttctgaatataaatataaatatgtgcaaagtttgacttggattgggattttgttgagttcttcaagcatctcctaatagcctcaagggcctgagtaggggggaggagagaggactggaggtggaatctttataaaagacagagtgattgaggcagattgtaaacattattaaaaaacaagaaacaaacaaaaaaatagagaaaaaaaccaccccaacacacaactgccctgtccagcccaatacctgacacagaatactttgtgtttgtttagttgcccccccccacaaaaacaaaaacaaaaacaaaaacaaaaaactgttccaggtaattccatcgctgctacattcctgtaaattgtcactgatcagtgctatggcagagcgggagcacccggggtggcagcagtccagcctctccaatgacctccagcctcccccacccaggcaggagggagggctgtgcagggctcggggcagtgggacctggtggctctgctctgaccacgaggcgcctgactggccaatacttactgggctgacattcccagtgctcagctgggaggcatgggtttccgccccccctccccacttccctggctgtgggctggcttggtgccctccagtgagtccctcagcctctccacccatccaggctgagtatgtggctttcctatgctgggtccctctccatgggacagggagcatttaaggcgaatctcttagccagacatagtcaggaggcacagagtagaatcccctgtcttctctaccaggagcctgaggtgaaagatgtcccgtctcctccatcctcccgctccatccacccaggtacaggaaggtatagtatgagtaggaaaaggagaccagctgaccagcccatccatcccctccaaatgttgcttcccccttaaaacggaggaagggccctgggctctcaggcaccaggtagactttggaacctgtgttttcggtgactgtcccggaggagaggatgtggggtaccaggatggttcccttcaggtcaccccaagcccttctccccggagccagggagaggagcatgtcaccaggatcctcgcctggggtgggcggggggtgtgaccatttccttcgccagcccgcagccctggggccctcaggacctctctctcttccacctttcccaggctccacaaccagctcaggtttaaaccaaatcaaagagcaaacaagttccgttggaaagtttgaagattccctggcagttctcattagttcagcattcccgaagtgtcccctgtttggaggcagaggggaagctgaggaattgaaggagaatccacttgtggttgctatcgtcccaccaggacagctggctcctccggagaagctggagactcaggtggtactcccccttccctccaacacattccaggtccgcctgccacattctgcagggagagggcagagggaggggcctgtccgccctctttccccccagagctacaggactctctcctggttggcttcttgtgcttgtgccatgtgccacggaggagaggggcctgcgtcccctctcccgacccatgccctttgcgccctttaccccttaaagcggggcatcgtactggtccaggaactcccgaatgggccccggcagctgggtgactttctcataggagtccaggtggccgttgacggtcttccgacagagatgctgaagagtggccacgttggaggagaggggccggctcaacaccagggggatcttctcgcccccggagtagatgtaataggctcttctggggggactcccagggagtggctgggcagacggctgctcgggcacctcggaggagggttcagtaggtggcgaggggaaggagggggctccagggggcggcatgtagtggtgcaccagcttgagcacgcagtcgaagcggggcacgggctgcgtgctccggggatcgctctgcagagagaagctgcccccctcacactggatgcgcaggttcttggtcccagactgggtcttgacgctgagcgtgaagaagtggcgctggtccgagctgtcgcggatcagaaaggtgccggcgggctcggcactgagcagcaggttcgcctcgccgccggtcactgcgctccagtagaagccgctctcctgcagcttgcgcactgcgttcaccaccagctggtactcgctcttggagctgaaggtcttgaggcgcaggctggtgtccagggggcggctcatcccggcggcgggaaacttgctgtgggtgaccatggcgcacggagccagcgtggatctgcgcggcggcggctgcagctgcttcgcggcctccgcacagcggccgctaccgcatcccggggggctgcggagaggaaggcgcgagcgcgttgagtgcccggaaccctccagcgcgcccggcccgccccggctcccctgccttcgccgagcgactggggcacccactgccccgggggccctctcctgggcccgcgctccgatccaggcgcctcacggagcccgcacggctcccgcccctgccggcagggtggccccgggcagccccttcccaggcgcgcactgcaagggcgcagcgtgggaaactcgcgcgcggaagttaggtctccaggagtgtggccgggtggggagcaggagaagggcccccgggactgcctgggcgccgctcagtccagtagccccgggcggtgtggacggagggagaaacccgaggcacgggggtagggaggggacaggagaagcccgaaggccccagccggagtattccgggaacctgggatctccggcttccatccgctctgcccctacctcgtcacctccctgccgggaatgacccgggaaggggaggggaaaccgggaaaagctcccgggactgagcgagacccctccccacgccgcgctcctccttcctacctggtcccgaatcgaagtctccgtccttggggctgagccccctcgggtccccaaggcgacgcggcggcgagacggccagcggtggcccgcgctgcgcccagatgttggcggccgtgaagtccacaaaggagccttcgcgcgcgcgtccctcgagcttcccctgggcgcccgccctgccccctgcgcacccccggaccaaccgggaggggaccaggagagggaccgcggcaaggggccgcggcgggagctgggccgggcgggcggctggcggctggctgcgtgcggggccgaagcggcagcagcggagcagggagtccaagtcggagccgccgcggaggccgcgctcgcgggtatataggcggccgccgcgccccgccccccgattcctggaactgcgcggccggccttcttgtaatgtttagtcactactcgcagcagagaaaggctgagcgcggagggtgagggaggggccgcgggcgccgagggcgggccgcgagcaggggcagggaccgggagggacgcgcgcggagacaaagcgcgacgagaggcggccgaggcggccggtgggcgcggcgccagccccggcggcgcgttcctggcagcggcccctccccgccgcgcgctccgcccccaacttctcattcacactttccccccacccccctcccttctaagaaggctgatttctggcagaggcgggggcgccgcttcgggagagcgggcagttctaggaggccgacctggagagcctcccggttccccttccccttttcccggaccccgcggggacaccccctcgccgccacccgggcctccccgagggcccaactgcgggtcaggcggcccgggccagccgaaagggaagtggggctaccccacagccaggcagcggggctggggtcagacccgggagccggaggttggagacgtgcgacagtcacctgcgggcagattccagaggggagacccagggctgcaggggacgccccttcgtggcagctacccagcctcggcccactgccaggttctttgccaaccctgacgcgagtgtggagcccccctcccctcccctatgaaaacgctttcatgcactggggtctgcaaacctggttggtccggtgtgggttgggccaggtgctctcggccgggctggagagctcgaggtggaacgatggccccaacctacggcccgcgtccgccagagggcgccctggggtctcctaggggagggcagtttggtgctgcgcggcccaggccttggaataggcacgccagggatctgcgggaatggctgtctccggagctggaaaggtggccgagaagggggcattcacaccccaggctggggtcagacctgggaataaaattctagcaggagagaatttccggaaagcagttttccggggttcaggctactgccagatggcccacaccccctggaatgtgaccccctgcctctcttggggtgggggaggacttgatcactggcggggagggggtagaggggaggagaggaagtgattgaggtgaaagattggtttgctgctggtcacgttggcactgacgtagatagtttgggcttggagacccggggccagccttatgaaggatggcaagttttgtcatcttgtccccaaatgggctgtgtggtgctggggacacccgagagctgcctcagtggcatttagattttcacctctcgggatgcagacgctgtgggcctggggccctgcgctcttcctagataccaggataatgaggtgctgaaagggaaggaagagactgccgccagggacagggagcttgggatgccagaacccagaactggcccttttgccggccctggaattgataggtgcgcactgcctttgccactgtatcctcagtccgtgccatcacctctccccagcatgtgctggggactcagtgagatttggacaagacacacagtttctctgggcttccgttttgccacctgtaaaactggagccagaaccttttccttccctttggcaggcggaggcgagaggatcacttgagcatggacattcaagaccagcctgggcagcaaagtgagcacccccatctctgcaaaaaatagaaaaaagttagccaggagtggtggcctgtgcctgtagtcccagctgcttgggaggccaaggtggaaggatcgcttgagtcagggaggtcaaggctgcggtgagccatgatcgtgccactgcactttagtctgggcaacagagtgagaccctgttaaaaaaaataataataaaatgaaataaaaagggccgggcatggtggctcatgcctgtaatcccagcactttgggaggctgaggcgggtggatcacgaggtcaggagatcgagaccatcctggccaacatggtgaaacctcgtctctactaaaaatacaaaaattagctgagtgtggtggcacatgcttgtaatcccagctacttgagaggctgaggcaggagaatcgcttgaaccagggagtcagaggttgtggtgagccgagatcgcgccattgcactccaacctggcgacagagctctgtctcaaaaaaaaaaaaaaaaaaaaaaagaaagaaagaaagaaaagaaaaggaagaaagaaaaagaaccttttgccataagagatttgaaattaaaaaaaaaaaaagattctgcacatcaaagcgtgatagaaatagaagtaacccagttagttcaactctccctccagcctatcaggagagcagaggaggaaactggtttattcaacacatttcacaaatattgagctccatgcaccaggcactgggctgggcattgatatataatgatgagtaggacctggtctttgccctcacaatgcttgcagggtaatgaaatggattctccttctctctgtaatcagttcattctttttctcatccattcagtgttacgtggctgcatgaccatacacttctgggtagagcccagtggaagacaaagaagactcaaggaatagcccttgaggtaatggatgagaaagtgctttgtaaattacaatgctctgacacaagtcaagttcattcatccattccataaacctctgccgagagcctgcttttgccaggcacagggcgaagtgctggaagacagaagtgctgggtgaatcctgcagggggagatggccaaggcaatcggcatggagcccccaggtgatgagtgaggtgggaggtgcggggctccctgcctgctcatctcagcaggagatccaactgctgttcgggctctatcacccagtagctgtgtgactttaggcaatctgccttaccagctgtgcctcggtttccttatttgtaaaatggttggagagtagtacctacctcactgagttgtctggagctcccacatgcaaaatgcttagagtggtgccttgcacataggaagtgctcaatgcatattaactgtcatgattttgaaagcactggggaggctttgaggagagggaggagtgagctgagctgctgcagcttgggctcatagggttggctatggatgtaagctgccttgttttggggaaccgtacatctcctatggaagatacattccaaaaagctgcttgtcttgaaacaggtcagccagccaccaagcttcttttttttttttttgagacggagtcccacctgtcacccaggctggagtgcagtggtgccatctcggctcactgcaacctccgcctcccaggtttaagtgattctcttgcctcagtctcccgagtacttgggattacaggcatgtgccaccatgcctggctaatttttttgtatttttagtagagacagggtttcgctatgttggccaggctggtctcgaactcctgacctcaggtgatccgcctgccttggcctcccaaagtgctgggattacgggcatgagccatcgtgcctggccttccctttggcattctaatctctcccatggtttcccatcactttctggatgaatccagactcctcggtgcagtgtgtgtcccacgctgctccatgtcagtttcatcggctgccactgcctcagcgactggtgcctcgtgctctagctacatggagctccaagctgtccagaaggtaacgttcctcagtcctgggtttctgcacatttgcttccctgtctggggacaaggagggaactaccttccacaccttggctgatttctacttttcctttaaaatttggcagacgggctgggcgtggtggcacgtgccagtaatcccagcactttgggaggccgaggtgggaggattgcttgagctcaggagtttgagaccagcttgggcaacatagtggagactccatctctacaaaaaattttaaaaattagccgggcatggtggtgcgcgcctgtggtcccagctactcaggaggctgaggtgggaggatcgcttgagcccagcaggtagagcctgcggtgagctatgattgtgccgcagcattccagcctggaagacagagtgagactctgtctccaaaaaaaagacggaaaaaggcagacactctaaacttccaggtagctctttttgcattaaccaaaatgttctgactatatctccagtgaggatcttggggaaacagactatatttgatttttttttctttttaagactggaacctggtacgtagaatgaatctctaagtcaaggatgatgttgacttctttccattgtttttagagaccacaacctgctttcttctagagtactttttggttttccatgcagggctcaggagctatacagatgggatagagggtgtgagtgctgggaagccccatccatggctcgctggagattagaggcctgttaatctgaagacaaaggaatgaagacgaaaacgtttctgaaaatgtgggtggagacacctgggcctttacagggtacgctccagagctgcttccaggcagggaccccggctgagagaagccagagccagagagtcgcaggcttgcttgctcttatcttccctctgctgggggggtcgaggggagatctggcccctctgctctgccctcctgatttcccgtctaagggatttaggagacttttgccttttcctaatctctccctttgcagaatttctgcgaagtcacaatcccatttccaggcaaaggtgcttggtcataaagataataaagatattcattcatgatggaggggaagtacacagtggtttcagctgcctgtagggctccacttactcatggtgtgtgacagatgctgagcccttccccaaatctcatggatgggaaggaaacctggcgccgcggggtggtcgcgggaagccgtggcatggcttggtgaacacaggctcgccgacccgggggcggatgctgaggttgccattgttggtggctgcatctgcagtagacgggtcgggatgccggcctcagaccacagcgttgctaaatgccaaacccaaggcctccccgtctttaacactgctgggcattctacagcgcaaggaggcagctggggctggactgcccagtgcctgccgttgactgtgcgtcttctgcctgtgagctagcctgccacacctggggatacacggtggggaaatcaatcagcttccctcccttctagagcttcaggtccggcgttggtgtctagaggcaaggggaggaggcagggaggcctcttcttttctgtccccctttctcttggccaatttggaggagatggtgggggacctgtctctcatctgacctcctggaagccctgcctgctgctccagtgtggctctcccagggctgaggcctggaacctagggctgggctacctggggtgctcagctctgccgcaccccagccctcctcggctgcagccctggcttcttttcttacccactgggatggcccgtgggactaaccttgcagcctgcaggactatggcccagatgacctttccggagcaggggaagagttcacaggtctcagaccaggttgaccccgagccctctctttcctgcttcgcataggggcgggccaagggaggcagggacaatggcattcctgtttgcaggcctttgttcccgccaggagggcccccggagctaataaaaaggtttgtggctccgatgtctaagaggcagtggaggagttctttcaagcctgacattccaggcccagccggcctctggcatttcccagaaaaacttcgaggaggggaggggaaagaaaacacttgagggacccacccacctacccactgcccgccttctcggattcctcgttccctctggggattgggctgggccggagtgccaggacccctgccctggggggcccattcctccacccacagaggggccctgggaagtgttgagagggtgagagtgggtaagtggggggtgactctaggagggtgcagagaggatgaaatgttgggggcgcagtgagaagaggaggaaagtttcttcccactttgtcaaaaaggaatccacatctgctacaagtttggagttggagggtggggagtgaggagttagctcctagccaatatctcctctgaccccaaaccgacaaatgctgctctgtccgaggctggggtgggaagagtttttatttgccctgaagcagctgcgggaacagacatcagggcagcagggcagttctgggaagtgaggctgtggtgaaccatctgggcggcaatgcagacgaggcagtgcccaggacggggagagcccgggagggggcgaggaggccatgctgtctctgggagacgtgcctcttgggatgtcctgggcccaggcgcccttggagaggcaggagctggtgggggaccagctgagtgcagctgttcggctcgccctgcaatactgcagttgggctggctgctggagccaagtggtcacggtcaggtgccctgactctcctggggctctggggcaggtgctcctcatgaccatggtgtgcctgcagcctctggtcaagctcctgcagcccgggcgcaggcttccttctgagcctctcaccctctgggaagtccctgcctcctccgcagtgtgaagcacccctggtatgcactgtgccgtgcactgattcttgggcaagttcaaatagaaaatgataggctgggtgtggtggctcacgcccgtaatcccagcactttgggaggccaaggctggtggatcacctgaggtcaggagttccagaccagcctggccaacatggtgaaaccctgtctctactaaaaatacaaaattagctgggcgcagtggcgcatgcctgtaatcctagcccctcaggagactgaggcaggagaatcgcttcaaactgggaggtggagatttacagtgagctgagattgtgccattgcgctccagcctgggcgacaagagcaaaactccgtctcaaaaaaaagaaaaatgtaaaagcaaaagaaaaaaagaaaataataccctctctctggctcccaagatcctgaaccaactttgaaggcagagaagtgggctagaagaagtggggttggagcctccaccaaggacaagaaggtgagactctaaggcgtctaaggtgaaactggggcagctatccccacgtgttccttcctccctcccccttgccggcactgtactcactgggccttaggctggtgttgttcagagtttcttaacctggagcatgtgaactgccccttcccaggtttcatactcccccaacagccactcccccgataattgcaaacaaaatgctggtggagggtcaggcccctgggggctgcaggacctgcctggagtcacttcttgcccctgcaacacttgttttttgtttgacacagtatcaatctgttgcccaggctggagtgcaggggcgcaatctcagctcactgcaacctttgcctctggggttcaagcgattcttctgcctcagcctgctgagtagctgggattacaggtgcacaccaccacgcctggttaattttttgtatttttaggtagagacggtgtttgccatgttgcccagacttgtctcgaactcctgagctcaggcaatccactggcctcgctctcccaaaatgctgggatcacaggcgtgagccactgtgcccagccataacacttattttatactaccatttattccttgagtagttatttatttatttatttatttgagacagagtcttgctctgtcgcccaggctggagtgcagtggcacaatcttggctcactgcaacctctgcctcccggttcaagtgattctcctgcctcagcctcctgagtagctgggactacaggcgtctgccaccacgcccggctaatttttgtattttttagtagagacggggtttcaccatattggctagcctcctgaccttctgatccatccacctcagcctcccaaagtgctgggattacaggcatgagccactacacctggccttgagtagatatttattgagcacctgctatgtgtcagggattgagttaggtgccagaaatttatcagtctcggatctcatggagcttagatgtttttccagaaggacaagattcttccagaattatatcgggattgattaattttgactgtgctgcatactatgaagaagtcccaggagctatgtgagcctattatggggagacctaatctattggggggacaaccaagggggattccctgaagaagtaacacacgtaggctgatgggaagctgaggtctagagaggtccctgcctggtgcgaggtctcccagtcagatcgtggcagagctccagctggtgcccaggttggttgactagactcccaggctttccccacacacaggctcgtctggcctccctccaggccactcggtggcatacacaggggaggggaggatggagagctggcagaggcagggagggcctgctggtgggacaggcattctcctggtgccacatgcccgggcctctgctgcccactgtcttttcccattcacttctacttcactctccctctcactccccaaaggccttagccccctgcttccagctcaagctgaagtggctgtgagctgagctaagaagaccccacttcgccaggaggagtgcctcacgcctgtaatcccagcactttgaaaggccgaggcaggtggatcacgtgaggtcaggagtttaagaccagcctggccaacatggtgagaccccttctctactaaaaatacaaaaattagccgggagtggtggcgcgcacctgtagtcccagctactcaggaggctgaggtggaagaatctcttgaatcggggagacagaggctgcagcggagctgagatagtgccactgcattccagcctgggggacagagtgagactgtctcaaaaaaaaaaaaaaaaaaaaaagagagaaaagaacccatttaattctacctgtgggaggtggttcaggcatttgtggaactttgcaaattgaaaacatagtttgtgaatacctaagacagccccataggtcagcattcaaaaggtgcaatcaggtgagccagagtcttcccctcctattccctggcttcctgtgccacctggggcatttttttttcttttcttttttatagaccagaagatgcaggctactgtgggcacaatgcctatgaattagccctgctctgcaagaagcagccaaaaaaaaaaaaaaaagatgcagagtggtggcatgtgcacggctgaatgcagtctgtagacgcagtagctgtgtggcctatacagaattaaaacaatttttgagataacattaaaaaaatctggaaatttcacatctacatttgaatctggagctttccttggaaaaacaggacactggtagcagtggaccacgttctggcacattcccgttggcccttcaggtggggcatgggctccccaggtcagcacaggcccaccctccagggtgaccaccctccccttccttcccttccctgccagggtctgcaggcattgaggcagcaactcagcctgacctctgcctctcccaagctaaagggcaaggaaggctatggactttggggcatttattttgagtctctttcctaaattcgaggagactggaaataaatcaagcctggccaggaggaggagtccagctcttcctgtcccactggcccttccctcttggacctcatcttaagcaggtatgcttggcctcttcctctacttcactgtgggggctgggcagggagaagctgcggggcgggggaccctgggattccctgggacatcactgggttccccacgctgtgggctgctggatctcgaggcctgcagctccttgctcgggtggcgctggcgacccgccatgccacaaaaggctgagattcccctgaaacctagagctgcttttatctctcactggtgacagagaaacaaaccaggatgctctgcccaaaaggcatttccagaaatctgggctctggcttcttgttgatcaaatgccagaacgtcctgggcttctttgtggcgagggagccattgagcatgggtgttttgttttgcagatgacaagattttcgacactgaaaagtttaaatgatgaatggaagagctttgaatggctcccacccctgcacagggaggttgctgattcgagcttctgtgtttgtcaaatttgttcctcacaactttcggctcttttgcacctcccctcggctccaacaggctcaggaccctagtcccagaaatcctcatctcttccagttttagggccacacaggtctagcagagcccatgccaggtacatggctacggctgtggggaaagctgttttttgtcgttgtttctttttttaagtacagggtctcaggctgggtgcagtggctcatgcctgtaatcccagcactttgggaggccaagatgggtggatcgcttgagctcaggagttcaagaccagcctgggcaacatggcaaaagtctgtctctagaaaaaatacaaaaattagcctggcgtggtggtgtgcacttgtagtcccagctacttggaaggctaaggtgggaggatggcttgagcccaggagatgggggctgcagtgagccaagatcattccactgcactccagtctgggcaactgagtgagaccctctctcaaaaagaaaaaaaagaagaaagaaaaaacacagcgtctcactctgtcactcaggctggagtgcaagtggctattcacaggcgcgatctcgttactgacctgcatgagaattttcacctgtcccttttcccacctgggccggttcacccctccttgggcaacctggtggaggccaccatattgatgctgaatttagtgcgaacacctgattggcatagtgcactgcagccggaattcctgggctcaggtgatcctcctgcctcagcctcccgagtagctgagactataggcacgtgccactgtgcacagcagaaaacttttctaacccaggagttggcaaactatggggcacgtgctggaggacgatttttggaaataaggttttattgaatcacagccaggctcattcaaattgtctgcggctgctttcacaccagagttgagtagttgccaccgagaccatctggcctacaaagtagaacatatttatttatttatttgtgtgggctttttgtttgtttgtttggcttttttgagacagggtgtcactctgtcacctaggctggagtgtagtggtgtgatcacggctcactgcagcctccacctcccaggcccaagtgatcctcccacctcagcctcccaagtaactgggaccacaggcatgagccaccaggctgagttcattaaaaaaaatttttttttgtagaaatggggtttcactatgttgtccaggctggtctcaaactcctggtctgaagccatcttcccacttggcctcccaaagtgttgggattacaggcgggagccactgctcctggcctaaaatatttactatttgccctttaagaaaacatatgctggccgggcgcggtggctcatgcttgtaatcccagcgctttgggaggctgaggtgggcagattgtttgaagtcaggggttcgagaccagcctggccaatatggagaaaccctgtctctacagaaatacaaaaaaattagctgggcatggtggtccatgcctgtaatcccagctacgctggaggctgaggcacgagaatctctcttttttttttttttttgagatggactctcgctctgtcacccaggctggagtgcagtggcacaatctcggctcactgcaagctccgccgcctgggttcacgccattctcctgcctcagactccagctgggactgcaggcgcccaccaccacgccctgctaattttttttattatttttatttttagtagagatggggtttcaccgtgttagccaggatggtctcaatctcctgaccttgtgatccacccgcctcagcctcccaaagtcctgggattacaggcgtgagccaccgccaccaccatgcctggccgagaatctcttaaactcagggtggagtttgcagtaagcggagatcacgccactgcattccagcccgggtgatagagtgagactgtctcaaaaaacaaaacaaaacttggctgggcttggtggctcatgcctgtgatcccagcactttgggaggctggggtgggtggatcacctgaggtcagtagatcaagaccagcctggtccatgtggcgaaatactgtctctactaaaaatacaaaaaattagccgaacgtggtagcgggcacctgtagtcccagctactcgggaggctgaggcaggagaatcgcttgaacccaggaggcggaggttgcagtgagctgagattgtgattgcaccattgcattccagtttgagtgacagggcgagactctgtctccaaaaaaacaaaacaaaaccaaaacgtatgctgagccctgcttggagggaaaagaagtctgtcttgtgccagggagagctggagttaaggcttagtgttggtgggaacagtatcagggactgttgggaaagatcagagtaacagcttagcagggagagtagaacttggggaggtgttggagggggatgaagacaggaaaagggctggggcctgtggggagactgggggctcagggaagccaggcccaaaaggtggactgagctttcagccttgcaaactgatagcaaacagtaggttagaggtcttcccaggaggccaggccacccttgtccccaccattggtggaaaagcaagaccacagtggttccctgttccagccgggaggccccagagctcactgcctttggccctgtgtgcattcctcactccagcactggagcccggttctggggccagatcctattcacagtgctcagagcacacaaagattcatgagctcgccttctgatggggcagagacaaaacacacaacagcaaacgattaggtcactgtaaggaagaggaagaaactaaaatcctgttatccgggttggaaagctgtttctaggggagggtgacatttggacagagctcaggatgagatgagctgagggaaggtgcttctgagcagagggaagagcaaatgtaaagatgctgaggaaggccgggcgcggtggctcacacctgtaatcccagtagtttggcaaggtcaggagttcgagaccagcctggccaacatggtgaaaccttgtctctactaagaatacgaaaaaaatagctgggggtggtggcaggcacctgtaatcccagctactcagggaggctgaggcaggagaattgcttgaacccccgaggcagaggttgcagtgagccgagattgtgccattgcactccagcctgggtgacaagggcaaaactttatctcaacaacaacaacaaaaaagatgctgaggaggatgcgggcttgagagaaggccaggccagtgaggctggacatatgaccaaggggaagaatagagggagagggaggcagccactcccaggtgggctctgaaaccgtctttgcaaaattgtaactgaggaaattatgacagtaaaagaaatcagacctaatcaactccatcttctttttttttttttgagatggagtctagctctgtcgcccaggctggagtacagtggcgtgatctcggctcactccaacctccgcctcccgggttcaagcgattctcctgcctcagcctcctgggtagctgggactacaggcatgtgccaccccgcctggctaatttttttgtatttttagtagagatggggtttcaccgtgttagccaggatggtctcgatctactgacctcatgatccaaccacctcggcctcccaaagtactgggattacaggtgtaagccactacacccagcccccatcttgcttctagcctttaagcagtccttgtggattcctgggtgtaggccgaactaactttgggaaggaattcagttcatggtttgactctgaaacaaaattgacaacagccctttcccgaaaagacccccttcttgcctggggtccagtcggcctttgcaggactaacaaattagctataagattagaaataaaagtttagggtcatgcagcctctggctccaagaatctgaacctccccaaattgctcctggggataacatcactattggaaaaccgcagatcagtgcgtgagatattttgcagactctgcattcatggatcagctgacaccacccagaccggttatctggctcaaccagttctgccatcccacccaggaatagaagatagcaagaaaaattcacttcaaccttctacgattccatctccaacctgaccaatcagcactccccacttcccaagctcctttactagccaaattctctttaaaaactctgatccccgaatgcttggggagactgatttgagtaataataaaactctggtctcccgcacagtgggctctgcgtgaatcactctttctccattgcaatgcctctgtcttgataaatcagttctgtctgggcagcaggcaaggtgaacccattgggcagttacagtttcatcccatctccagcaagcaggctgcattccttttaacaaagaacaggctcctcacaaacagctgaacagcccctcgggacagtttctcatctctggaggcagaaggtgggccggacagccacttcctccctttggaatttgctaacagccctgtgtttgggagagaccctctctaggcaagcaagctagaggaggaggggccttcctcttgtgttactgtgattttcggttgagggagtgaatcacaggcagtgaggcatgggctgttggctcaggatttcctggtgtttcctgcctgggagagctgccccactctcaggggcagcagcccaccactccttgacgtcaactctccctccaatgaatgggtttccttttccgtttgggaagacatgggatctgccgtcaatcccgtcgaccctgtctttctaaccctggcacctcctgtctgggaaggagcgagtgcgactaacgagaaggcagtgggtgagggcaggagggcgagggggactcagaggacagatgtcttctcgcccgcagtcattgagatgggcatccagaaaccccatccacagcagtagtgtctgacccagattgagagccggccacgcagctttgggacaccctgagtgctcccaggcaggctctctgggtcacctttgttgtctgggagggtcttatctcctctacttgttttcagtaactagcccagatgagacctcctgacacgaacaatgcatgtgctgtcatcctgtaaatggaatcatttaaaaattgcacaatctctgaaaaccattatttaacatttttgcaacctcaaaatgtatgtgtccccagcaaagtcgtggttgcctcactctggtgatagctctgtctgttttaaactagccatgaaggccagaggctctcgatgtgtggtttcagaagggactgggtcattccttgatgttatccttagggtaaatacttattagtgtgacttaccatgctatcaatattgctgtctgttgctagcatttctttaaggttgggaattcccagtgagcctgtaccatggctgtttgtctcagtacctcgcacagcaaagcacccatgcagaaaagctgccagctccttctaggatgataaccaggctcccatagcccatgtggcgctcaccgctgagcatgacggtgtagccatacagcaagtgtttactctgcaacaaccgtgggccaggaacagtgcaaaagtggaaccatgcaatggatggcctcattctagttactggaagttaggaaatttgatgattcaccatttctaacttggaagggttgaatcaaattccatgtagtattagtaaagctatctaaacgcaaaagaaaactttaagccaatctgaaatacttgttgattgtcaacaatttggaaactccttaatggcaccaaataaccaacattaacatttgggggtatttactttcagtctttctgtgtacatacacgcatttcctctttcttcctctcctttaatgaaatgagatggtctctacgctactccttggtaatttggcttttacacttaatgtcattaaatattcttccagaacatgttatttttatgattgtgtggtcttccaacataccgatgtatcattatttaaccaacccccctaccctgaagatttgcttccacacttccgatatcatgaacaaggctgagatgaacattcttgtgggaatgtgtagttgatttccctgcataatctgtggaagtggactttggagtgtttttttcagtgtgtccatatcttttttttttgagactgagtttcgctcttgttgcccaggctggagtgcaatggcgcgatctcgactcactgcaacctccgcctcccgggttcaagcgattctcctgcctcagccttcctgagtagctaggattacaggcatgtgccaccatgcccgtctaattttgtatttttagtagagacagggtttctccatgttggtgaggctggtctcgaactcccgacctcagatgatccgcccgcctcggcctcccaaagtgctgggattacaggtgtgagccactgcgcccggcccacgtgtccatatcattttaacctcacaacacggcagactatgattatgtcctacagcttttccagtttccaggtcccagcctatgtgggtcagccagggagctgcatattacagatcagagatcacctctcctgcctttcagaatgccacaaagttttccattttaaaattagctgcaaaaagtgttcttgggccgggcgcggtggctcacgcctgtaatcccagcactttggaaggccgagttgggtggatcacttgaggtcaggagtttgagaccagcctggccaacacggtgaaaccctgtctctactaaaaatacaaaaattagccaggcgtggtggcgcacgcctgtaatcccagctattccggaggctgagacaggaaaatctcttgatcccaggaggcagaggttgcagtgagccaagattgcgccattgcactccagcctgggtgacaagagtgaaaccctgcctcaaaaaaaaaaaaaaaaaaaaagtgttcttggtgtatgaggatgtgctccgtcagctttttgggcatagaactgtgtgttgccaggggccagtgatatctgtgtacttgggcatatcaggagggtggaagactgttcatctcacacagatttgcttaggctgttctgtgccatggagctgcagcctctggggctaacagggtgaaaaatgattcctctctcagtctggtggggattttccgtggttctgtgcaccttagtgagtcagcgttaaccaggttacaagactttgtacaagaacagactttgttcaagtttaacaccttaggggtgttgtacaagtctaaagaacaccctatcaattagagcctcaaacagtaattccctcacttatcagtgagaagtcctttttttttttttttttttttttttttgacggagttttgctcttgttgcccaggctggagtacagtggttcgatcttggctcactgcaacctccacctcctgggttcaagcgattatcctgcctcagcctcctgagtagtttgggattacaggcatgggccactgcgcccagctaattttttgcatttttagtagagacggggtttcatcaggttggccaggctggtctcgaactcctgacttcaggtgatccacccgcctctgcctcccagagtgcagggattacaggcgtgagccactgcgccggccgaggagtcaatcttgacagccagtggtcaggctcggtggctcatgtctgtaatggcaacactttgggaggctgaggctggatgatctcttgagcccaggagctcgagaccggcctgggcaacgtagtgagacccccatctcgacaaaaaagtaaagaattagccgggcatggtggcacacgcactttggtggtcccagcactttgggagtggtcccagcactttgagaggatcccctgaggccgggaggtcgaggctgcaatgcgccaagatcgcgccactgcactccagcctgggacacagaccgagactctgtctcaaaacaaacaaacaaaagcttttttgacagctggtgagttggagccaagcgtgacggtgctagagcccctgcgccgcatcctttcctccgcgacctgtgacgagtgactgcaggaatgcaggccacctggcgcccttacggatttaacgggccggcttccgaccccctcctgcggcgcgaccactgttcctcgcctgtgtcccccagaggggaaactgaggcttgggggcggtgcagcgccgccctccccgagccaggggttccgcgcctgcgcgcctgagccgtgtccgcgctcgcctttgtcaataaagttcgcgcccgccgggagcggaagcggaagcggcgagtctccatggcggtggcggcggcagctgcggcgggacccgtgttctggaggcgactgctgggcctcctgcctggccgcccagggctggccgcgctcctgggacgcctgtccgaccgcctcggcaggaaccgggaccgccagcgcaggaggtgagaggggcggccgggatgagagtgcagccctcgcggctgcagcccggccccccggcgctcaaactcccggccccagcgtcctgggcatccgcagcgagtccctccccggtttccgggcccatttctgcctcccggggctcggcgcctgacctatgtgcttcttcactggccttcttgagggagggtgggcggctcgtgctccattatcggccgggtccagccggcgggcctcctgcgcagcccggccagtccttgctccccgtctacaccgtgcttgttggcgagccccggccaccgtgcacttacacgttaaaagagggactgtgtgtgcgttcagggagcttcggtcaagctccagaggctgtttatatcatggtttcggccccaggatgtgagtgtcggagagttcagaggggtcttttccttaggtaagcctggctgtgagtgaatcaccgttgctgggattttgtgtatagagcgtttctcacatcctgccagaaaaagctgtgaagcaatccttagtaacactcaggcatgggaagaggagccactcgaaacactttttacacatttcaaagggcctgtgttctggaaaagtactgaagttatgtaaatgatgaagtaggctttggagcaatttgttcaggcagtggtcttttaaaataaacatttgccaagaacatgctgacctgaggcttgctaatattaaaaaaaaggggataaataattcttggccgggtgtggtggctcacgcctgtaattccagcactttgggaggccgaggcaggtggatcacctgaggtcaggagtttaagaccagcctgaccaacatggtgaaaccgtctctactaaaaatacaaaattagctgggcatggtggtgcatggctgtaatcccagctacttgggaggctgaccctgaggcaggagaatcgcttgaacccaggaggtggagtttgcagtgagccaagattgcctcattgcactccagcctaggcaacaagagcaaaactctgtttcaaaaaaaaaaaattctcttgtgtgcaaatagttttcttttcttttcttttttttttgagacggagtttcactcgttgcccagactggagtgcaatggcgcaatcttggctcacctcaatctccaccttccaggttcaagcgattctcctgcctcagcctcccgagtagctgggattacagacataagccaccacacccggctaattttgtatttttagtagagacagggtttttccatgttggtcaggctggtctctaactcccagcctcagttgatccacctgcctcggcctcccaaagtgctgggattacaggcgtgagccaccgtgcccggctgcaaataggtttcttaattgagtcttacacttgatctttaaaaaaaaaaatcttagaactgcttcctttagttgaggttgcattgtgttagattttctatctgtacgtgtactcctcgggtgagatttgacctcctggggtcagacatctagtacagagatctggggtccagtcatgtgtactgattctaggtacagaaaagagcttgcttcatggtgatctatggtggaagattttcatcgaaaactcaagtttgatttaggggaatttttaggtgatagaatcagggcaggatggcgctcttggaaacctgctaggtttcacgttggtgaacccagcaggactggggctgtaaaagaaatggcctctgcattttttgcattttcattttttcagtgtttaacaaaagacctgctcatctctgggtgacgaagtcagatgacttctacgtcctggcatcaaaccactgagatttggtttacagtttcaaaaaaatgttctacccttgaagacaagatttaggtgactttgtcatttccctctatatgtttaaactatatgaaaaacacttcattataaatcattgttcaacattggaattgattactaaaggatgttggggcagttgacacaaatattttaaaaaagaaatctctcatgagtgtgctttttttctttttctttttctttttttttttgagacagagtcttgttctgtcactcaggctggagtgcagtggtctgatctcggctcagtgcaacctctacctcgtgggttcaagtgattctcctgcctcagcctccagagtagctgggtctacagacacatgccaccacgtccggctaatttttgtatctttagtagagacagggtttcaccatgttggccaggctggcctcgatctcctgaccttgtaacctgcccacctcggcctcccacagtgctgggattacaggtgtgagccactgcgcccagccacttttttgttttttggtggtgggaggggcagtgtggcagtggagatagtctaaattgactttctaatctcttttttttgtaaattgtgtgagtggatgcagtttgtgtgccttcatccttcattaagctgagagagatgattgtttctctgggacaacagttcaaccagcaactcagtttcttgggcattaagacagaagtttttgctttgtaatcctcggaaataatgcctatggtaggactgaggataaatgctttgaccggtattgagtggtagtgtaggtttctgagcctttctttgccttattcggtttgcagttcttttctgattcgttgtggccttggtgttcgagttattcatgtttgttgtggctgcttaccctttattagctgctgactttgctttcttctccattattcagttgcacctcccaatttctcattccccgaatgatgtggtttcttgtaactcgctgatcattgattcattgataatagttctgtgcagtcatgagcttgaattattttaggttttagcttgtcgatctgagtcagctgttggagggccagtgaaccctcgtgaggggacgttccttttactgccgcggtttcctttcaggcatagagacagccagagagacagagaactctacttaaaattacttctgttaatgatttagaagcactgtcatttcctcttaagctagcatctgactcattatcattaggaactgctggatccgttaatttattcatcatgtgtgtattgagcactgctgtgctgtgctaggtactcaggaagcaaagataaagacacagccccacctccaagacgctcagacccataaacaattacaagaagtaggtagaaggtcatggcagtaccttggagaggtcatggaaggcttcctggtgcagtggctcagagctgttttgaaggaggggtcggagtagttaggctcggtgaagaagagggggagtggatgttcaagaagtgatagtgacatggactgcagcgaaaggcaattctgaggtcccaccaatactgaaaccatttccaggagctgactaggggtaccgagtaggggatggagggagggaagaagaggagctaggagcaagccagtctgggccagagacccaggaagacaagttctgagattccatgtatgatttcttttgattctggttcagcctgagatggtgggggcttttatatgaagtcggggcagtgggagcagaaaagagggctgagtgagaatcagtcttgatggggcacatggatgttggtacatttcacgaaaacggagtaaagaagaggctcaggttttggggatgatggtaaagtgcatttgggttatgttaatcagtatccaggttcctctaggtgatgtgttcagtgtccagttgactgtggcagaactggagctcaggagagggagacagatgcttcagatagggtttttttgagtcatccggctacacagaatggttttttttttttttttttttttttgagatggagtcccactctgtcgcccaggctggagtgcaatggcacgatctcggctcactgcaagctccgcctcccgggttcaagcgattctcctgcctcagcctccggagtagctgggaatacaggtgcccgccaccacccccggctaatttttttttgtaattttagtagagacggggtttcaccatgttagctaggatggtctcgatctcctgacctcgtgatccccccgcctcggcctcccaaagtgctgggattataggcgtgagccaccgtgcccggcccacagaatggccttgttacttggagtagatgagaccaagtgggaaatgtatcatgaaggcattagttcctaatcttgaacttgcctactatacaaggaaatatttatctgtggcttactttttttcctttttaaactatttttaagttttagctatacatgcagaatcatctttatgtttgaaactttttcacaatttgaggagcttgtgagtgtgtgtgttggatgggttaggggttcttaacttctctgagttataagagggaaacaggtgtccagcagattgttttcaattagattttctttcctttttttttttttgagacggagtttcactcttgatgcccaggctgaggtgccgcaacctctgcctcctggcttcaagcgattctcctgcctcagcctctcgagtagctgggattacaggcatgtgccaccacgcccatctaattttgtatttttagtagagacgcggtttctccatgttggtcaggctggttttgaactcctgacctcaggtggtccgcccacctcagcctcccaaagtgctgggattacaggggtgagccaccgtgcccggcctagactttcttacattgtagtggcaggtcacttgttcaacgtgtaagtagtttttactctgagggaccaccagatttccagaagttacttttctttgaactttgtgatgggattcggtcttccttactcttcagagtttagtataaccatctcttcgtttgtttatagcagtataatggctgggaaggggatatttagaatcaaagcatagttttgccaaataattcagatttgattttgcagtgaattaaaagatttacaacggactgactttctcaattgtagctttaagtgaatattaatgtgagtatccctgagcacgttatagttggtgatgaattagactcaatcagttgtctgctggtaggcaaatagaacccagcctgggattaaaatggtctgaatgataatccctttgtaatagcgtgatctgatttatgtaaacgggtcgattttgagggtgctgggagtcaggctgactgaagccctttggagtcatagaacatgcgattggttctcgtcaggcactttgatgtgcctggtgcatttggccacccaggctgtattgtgggttataaatatattttggatttctggcccccaatgtaatcgacttccttttggctaagccaaggggagagtcatctagtcagcatgtagctgcatgctggcagcctgggcctctcgtgccggacttgttatgggagttcagcaggccgttggtcttttgtaacctacgggaatccacactcatttcccttactcggggttaggtcttgcattagtcaggaagggccgcctgctgccagggttgcaggaagtacggtaccttcttgtagtttctggagcctttctcaggaagtgttatgactgttgctttttctcatcagttcacttttttacatttaaatatctgtgactgagagggtagggtgagttgttctcaaaaagtagtttctgaaaatattgcaatccagagagctcagtttcttttaaaaacttcttttttcatggttttgtacagatttggatgggctccaggccacagagtctgtaccgtgaatgtaccttacggttaaagaagggcccctggaccttcagaccacgcctctgagggacactgaattaccgacctgtgtttggtatggagagcgcaacttctgccctgttcagtgaggacagccctccagctttaccgtactctttcatcaaagtcctacataccctgttttgaaaaaaccccaagaagttggcctgttacatgtgtcccattggtagtgggtgacagtcagtactgcagctctagggggaaacacgtgttctctgacaccgggagaagatgtggaagggacgtctaaaggtgcagtgtagaccgcggtgtaattccctggtgtttgcttgtcttcagtggcatcccttctctgagaagcgggcgcccggtagggcctccaggcgctgttgacacgcgctgaggagaaaggcgaggggtgccagtgttttccatgaagcagagcacgcgcagctgcagaacggtgaagtggaaaaccgtctcctccaaaagggagaaatgccttctgttttccccaggtttctttctttctttctttttctgagatggagtcttgctctgtcgcccaggctggagtgcagtggcgcaatctcggctcactgcaacctctgcctcctgggttcaagccattttcgtgcctcaacctcccaagtagctgggattgcaggtgcctgctaccatgcccggctaatttttgtatttttttttttttgagatggagtctcgtactttcgcccaggtcagagtgcagtggcatgatcttgcctcactacaagctctgcctgccgagttcatgccattctcctgcctcagcctcccgagtagctgggactgcaggtgcctgccaccaggcccggctaattttttgtaatttttagtagagatggggtttcaccatgttagccaggatggtctcgatctcctgacgtcgtgatccgcctgcttcggcctcccaaagtgttgggattacaggcgtgagccgctgtgcctggcctaatttttgtatttttagtagagatggggtttcactgtgttggccaggctggtcttgaactcctgacctcatcatctgcctgctcggcctctgaaagtgctgggattacagccgtgagccactgtgcccggcccccgggtttcttttgtaaacaggtgtgttccatagcttctcagctgcttcctgctctcactgtttcagtttggctgattattgtgagctcagttcccactgaggcctctcatgggggcaagtgtgtgcagggcgcgttgtcctgcctggggctgcctgggtggctaagcaggcttccctctccttgcttggtggcggcctcagtcctggctcgccgcttggtcagagcggttcagatgtgggtcttcctcaagatgatgggaagaaactttcctcccctccccaaggcaccctgctgaggacctctctcagtcaggggtcctcagcacttaggcccagcccattcctcagttcagggaatttgcctgcagattccacgggaagccttaaatcaggtgactgaacctttctcctgagtcaggcttcctggggtggtggctggagccgggccacgggctggtcctctgagaagatgctggtctcatttcacctttagagtggcaggctgaggattgttttgcattgtctgtcatttgttttggttgttgctgaggttggtgtggtgatgtagtacggctggtttgattttgaatgctggagcactggtgctaggggatatcactggctcttgccctggtcctgctctctaaacttctccaatattccagggtaaaggagtggccttcagagaggcaagggtggcagaaggttattatctgactccccagcccccaccacttcctccttcccataactagaactgggcgctagatggtgtctagaaagagatgattcaggggagcccaggtcttgatgtggaaattgtgtgtgtactggtttagttctctaaatggtgaatgtgacatgtaactagacttttttggtaaaataaccacagcctctgcctcctcacgtctcttggggctttgggactgggccatgtgctttcttggtaagtaagcctccctgggatgggggaattgagcttgcgcaggtggtcagcccctggaggctgggattattatgcagtgggggctgctttagcatggggataaaccttttctgagcaaattcccaggagttacattgtggaaagccgggaactgacccccatggggttctgtctgatgtgaaagaaaaaaataggtccctgagcagcgagcagtatagtttcagagcaagaactggctccttctgtcctggctgatgtgttgcagttagatggtgatgatggtgatgatgatgatgatgatgatgatggtgatgatggtgatgatgatgatgatggtgatgatgattagcatttttgagacacagtctctctccatcacgcagcctggagtgcagtggtgtgacctctgcaacctccatcttccaggttcaaccaattctcctgactcagcctcccgagtagctgggactataggcgtgcgccaccatgcccagctaatttttgtatttttagtagagatggggttttgccatgttggctaggctggtctcgatctcctggcctcaggtgatctgactgtgcaggcctaccaaaatgttgggattacaggtgagagccactgcgcccagccttttttttttttgagacggagtttttcctcttgttgcccaggctggtgcacagtggcgcgatctgggctcactgcaacctccgcctcccgggttcaagtgagtctccttcctcagcctcccgagtagctgggattacaggcatgtgccaccaggcccggctaattttgtatttttagtagagatggggtttctccatgttggtcaggctggtcttgaactcctgacctcaggtgatatgcccgccttggcctcccaaagtgttgggattacaggtgtgagccatcgcgcccagcctttttttttttttttttttgaggtggagtttcgctctgtcgcccaggctggagtgcagtggcacaatcttggctcactgcagcttcgaacacctgggtttaagcagtcttcctgcctcagcctccctggtagctgggactacaggtgcacgccaccatgcctggctaacttttaatttttctagagagggggtttctctatgttgcccaagttggtctcgatctcctggcctcaagtgatcctcctgcctcagcctcctaaagcactgggattataggcacatgctaccgtgcctggccatttagtttttttgagtgacactagtccagatgtggtctccttggcatatgttgtcattgtggcgacctgtgtaaaacactcagctccttttttatgcaccttccttttttgggtatttaaaattgccacttgaaggttgagtctcctccataatgtatccatgaaacgtagttggctttcagctccttttcctctctaacaaaaataaacctgtcagtacacagattaaacaggaagccagcataaaaaagccttcaagaactcttggcctgaggccctcgtggaacattcccagtgagagctgcctggtaaggaggagacctgcctaggataactccaggggctctgggctcatcagccctgtacctgccaaagtgggtctccgcaggtaggacggaggtgataggtgaaccctgacacctgtgtaggctctgtgtatgtgtgttttctctggactactgaggccctcttgggtttttctgctgaaagtggtcttgttcctgtttctttctttctgcacttgacctctagggtcacgcgatcgtccccctcaatctcccgagtagctgggactacaggcacatgcctccacgcctggctaattttttttttttattttttattttttgtagagacagggtcttgctatgttgcctaggctggtctggagctcctggtgtcaagtgattctcctgccttagactccagagtgctgggattacaagtgtgagccactgcacccagcccagtttcttctgcttacgtcccttcacacttcctgcctgaaacaccctcccctctgagttccttgtttgaatcctaccagctttttgaggccactggaggagaatgctgcagaaccttcccagtagcccaggcatcaccagttcccctttttgatgccttgaagcacatgcactatttggacattgatttaattttagcatcttttcttgtgttcttagatgatgtcaggtgtgtaagtctgtgaggctaccaaggttgtgggaggcagagactgcctggttcttcatttgtaccctccatggtatgtcatatgtgcttacatgatggctttgttgagggttaagttgaacaagttgaacttgccctctcctgggttgctatgtgccaaggagtgtttcctcttcttccttttttttttttttttttttttgcggggggacagagtcttcctctctcacccaggttggagtgcaatggtgtgatctcggctcactgcaacctctggcgcccaggttcaagcagttctgcctcagccacgggcggctaattttttttttttgagacggagtgtcgctctgttgcctaggctggagtgcagcggcagcatctcagctcactgcaacctccgcctcccagttcgagtgattcttctgcctcagcctcctgagtagctgggactacaggtgtgtgcgccaccatgcccggctaatttttgtatttttagagagacagggtttcaccatattggccaggctgttctcgaactgctaacctcatgatctgcccgccttggcctcccaaagtgctgagattacaagcatgagccaccatgcccggcccaatttttgtatttttagtagaggcggggtttcatcgtgttggccaggctggtcttggactcctgacctcaggtgatccacctgcctcggcctcccaaagtactggaattataggcgtgagccaccgtgctcggcccctttttttttgagacgaagtctcactctgtcactcaggctggcatgcagtggtgcaatcttggctcactgcaacctccgcctcctgggttcaagcgattctcctgcttcagccttccaagtagctgggattacaggcatgtaccaccacacccaactaatttttttgtgtttttagtagagacggggtttcaccatattggccaggctggttttgaactcctgacctcaagttttcttcccgccttggcctcccaaagtgctaagattataggcatgagccactgtgctgggctgcggctctcagcttctttgaaggccgcgtgtggactgaccacatgacctggagcagtacagcggcacctgatttttggatggtctgagagatggcagaaatgctgtgaggcaggggagacattgattttatgctgctgttgcctgttcccccgcccccgaccatgtttcattagtgaatatgagactctaggccccttggggcctcgggttgatgggttgctgtgcacctttcccattgtccggtggtttctgctgcactgaagggtccttcgctctcctctcttgagctttgcaggagggtggcccaggatttgggaaacccaggcagcgagccctgcgttacacatctaggcccttcatctgcaagctgatgcctgtgagtgtcatcaccccctctagagacgggggtgggggaggaacagctgtttcccacctctgcactgggtggccacggccagtcgcagacttccaggatccacagaggcagcaccttctgctgttgactaaggttttcttggcagtgaatcggcagtgacagaccggtgggctttctgggaagtgcagctgtgggccatctgttgtctgtgcagggacatttacgaagcctgggaagattgagggctttatcatgaagcaagtgagtgaaatcatcttcctggaatttgtggccattcaggccttgggatgtttgagcatcctctcccccacgtccctcttgaggtcacacactgaagaggattttcctgctgctgtttgcaggactaggattcatagtaggtcaggtctgtgtggggctctgggtgtgcggtccctccacccccatctcccgcaggtttttagtcattgagcagcagaaatgaagttctgtgggcagaaattcatctccttcagccttggcctcagtggagtgtggagtccgctggggtgcagctttatgtggtcgagctaacactggccagaaatggtgtgtgaccccaccaaacaggatgtgtctgatggtgaatgagtatggctcatcatcactcttttttttttcttctttgagatggagtcttgctctgttgcccaggctggagtgcagtggcaccatctcagctcactgcaatctccgcctcccaggtttaagcgattctcctgcctcaggctcctgagtagttgggataacaggcatctgcatcatgcccggctaatttttttgtatttttatttttagtagagatggggtttcaccatgttggctaggcttatcttgaactactgacctcaggtaatctgcacgcctcggcctcccaaagtggtgggattacaggcgtgagccaccgtgcgcggccacggctcatcatcactcttgagaggagctcatttgctcccgtctctccctgctccagcttttctttccgagtctgattttgattgattgagacagggtctcgctgtgccacccaggctggaatgcaatggcatgatcatagctgggagaacagccttgaactcttgggctcaggagatcctcctgcctcagcctcttgagtagctgggactacaggtttgtgctaccatgcccaggtaacttttttttgagacagagtctcgttctgtcacccaggctggggtgcagtggtgcgatctcgcctcactgcaacctccacctccctggttcaagcaattctcctgccttagcctcccaagtagctgggactacagtcacataccaccacgcccggctaatttttgtatttttagtagagagggggtttcaccatattggtcaggctagtctcaaacacctgaccttaggttgtctacctgcctcggcctcccaaagtgctgggattacaggtgtgagccactgcacccagcctgcccagctaattttaaacaattttttgtagacactgggtcctgctatattgctcaggctggtcctgagctccttgactcaagcattcgtcctgccttggcctcccaaagtgctaggattataggcctgagccaccatgctcggcataaattggatttttaaagagaaaagtttctttttctgggtgcttccttgaatagaaatcttgtttatctcatgagtcataaagcggggcatctgggctgtaatcatcagacttctgccagacttacccttctgctaggtgtcttttagtggtggctgcaggcaaatatttttgaggtagattcattagaacgttgccatgtggtagctaaccatgtggtagcttttatgagtttacttgtggatgctctaaatttggttcctgagttgtttggaattaaagtttgggatttatctataggtattgacacttctcaagttgctcagttagtaggctctttaaggaataagaggaaagggggctgaaggaaaaatcctttagcagagcttgagttgggctcactttttaaaatgttctagaaaatctgacattcataacacaagcaacgcacccatctcccagcccctcttcactccccagtaactgaggggggcttctgcagaagtatttgaggtatttgaggtgtgacccagttgcatatttctttaaccaggtcaccatggctgttattggctcccttgctgtccccagctgttccccaggtcacctccccaccttgctgcctgtgtccagaaggcgtgcaccggttccagtggatcagaaacctggttccagaatttggagtctccagttctcacgttagggtgctttcttccccggcagagtttttcgagctcatgaaggtaagtggtatctaaaggaaagaagtttgagttagagcttttgggggatcaggttggtgagtcctgagtgctttctagtctagaaactttggatagctgctcaagcttattccttctgggttttacctgtcaggtttcagcttcatagatggttgagctgagccacagtcagaaacttgcctgtggggccagcgtctcaggtggagaagctctgagaaggcaacagtgagaacaaggacctagaccttatttttatttactaattttgttatttttgagaagggggtctcactatgttacccagatgggtcttgaaccactgggctcaagtgatccccctgcctcggcctcccaaagtactggccactgtgtgcggccacgggcctagacttcgattctttttttttttttttgagatggagtctcgctctgtcacccaggctagagtgcagtggctcaatcttggctcactgcaagctccgcctctcgggttcacgccattctcctgcctcagcctcccgcatagctgggactacaggcgcctgccaccacgcccagctaattttttgtatttttagtagagatggggtttcactgtgttagccaggatggtctcgatctcctgacctcgtgatccacccgcctcggcctcccaaagtgctgggattacaggcatgagccaccgcgcccggcctagactttgattcttatgggcgcactgattccttttcctccatggtgaagttgtggaccacgggaagggaggttggtgaggactgaggacccgtgggtcacatgggtatgtccttgctaaaggtgacaggggaggagggcatctttatctagtctgtgtatgatggacccctaacccgggaatcatctccaaacacagtagtgtcatcttggtagatgtagtaggaagtaaaaactcgtgggtgcgatttgatatgcatgaagaggcctttcaaagtaactgggaatctagacatcctgggtctaaggcttgtagtcttggttctttagggactctgtcttaagtgtgtgcctttcctctcctggtagtgatgtaagttttgcatttggggggttcagctttcaacatgttactcaggtttacatgccacatctggttattctggttaaactgctcattggaatgaacactaatcaacactgatttttaacagcatgaactctgagtttgtattagcagtgatattagaatgaaggtctaggccaggcgtggtggggcctatgcctgtaatcccagcactttgggaggctgaggccggtggatcacctgaggtcaggagttcgagaacagcctcgtcaacgtggtgaaaccctgtctctaccaaaaatacggaagggtggcacacacctgtggtcctagctagtcaggaggctgaggcaggagaatcgcttgaacccgggaggtggaggttgcagtaagccaagatcgcgccattgcactccagcctgggcaacagagcgagactctatctcccaaaaaaaaaaaaaaaaaaaaaaaaaagaatgaaggtctgatggggccaggcaagcaggtagaatgctgagagacaataggaaatctgggtagagactcccctttcacctttgtgcagaaaatgaactcactcatttgagtgcctgcccattttctctccttttgcgcttttgttctgtttgttgatccacgcttagcttgactggctcattcagagtgcattctttgtgtgcacacaggcgtgtccttttgttctcccctctcacctgcctccctgctctgctcacctgtccttgtttgtaccgaatgatgctgcaactgttggctctttgctcctaattgattttctccttggcttgaagaaacaggtttttcttttcttttcttttcttttttttttaagacggagtttcgctctcgttgcccaggctggagtgcaatggcacgatctcggctcatcacaacctctgcctcctgggttcaagtgattctcctgcctcagcctccttagtagctgggattacaggcatgcaccaccatgcctggctaattttatatttttagtagagacagggtttctccatgttggccaggctggtctcgaactcccgacttcaggtgatccgcctacctcggcctcccaaagtgctgggattacaggcattagccaccgtgcccagcctgaagaaacaggtttttcaaaggcagttttctctgtcctaattgactctgggaggatgactgactgtctccacatagtgatcccctggccaggaggtcgggccctgcctgaggagggtgggcttgcagagagcaggaaggggcagagaggcttgcctcagcaggccgagaagaccccagggcctcctttccctgccatctgggctgaagtgtgggcagattcttctggtttgtgtcacaccgagtagcacgtgtttcttcccagggcgcacagcgagaagggaggacagtgctggtttctgcctggtccccatgtcttcattatagctgtggggcctggtgtcctgtagtaaacagtcagatatgcttcggttgcctgaactaaattgtcttatgccttatttattttttccctttctttataatcatcacccccacaaacatctgttttaattggtaacaaaacaaaggaaatagcaaccttgggaagttgctttgttttttccttgtccggaagcctttcctagtgattgttcatgtttctgtctagtcaagttgcctgtcttcctgtgttgacaatgcagggtgggctgtgttgttccttctcatagggaagcaggtagatgtgaagctgcctccctctcacctgggtctcctatgtatcttttgggggtttgacctatggtagcactgccattctttgtacccctgcctccttctctggggtggagctgctagggagaggccccctggctgttaggactgatttggggtatcatcttggggcactgatgtgttctgctcatgtgtctatatacctgtccatctatgtttcaagagtgattcgtgcccagtatggacattggaaactgcagatgggtagaaggtaaagagggcaggtttgagacagaatcttgctctgttgcccaggctggagtgcagtggtgtgatcacagctcattgcaacctctgcctcctgggttcaagtgactcttctgcctcagcctcccaggtagctgggattacaggcacgcgccaccatggcgtggctaatctttatgtttttagtagagacagggtttcgccatgttggccaggctggtctcaaactcctggcttcaagtgatctgcctgcctcggcctccgaaagtgctgggattataggcgtgagccactacacccagcctgccttcattcttcttaatggccgtgttgcattttatagttggcctagactgagctttacttttcaggctgagtattttcatttaggattgtgggaccttatttgggaggttaccatacacgtttcgagcttgctttaaatattaattggtgaagacataggatagttcagcttggagtgggatttgcctcccaggtcaaagggttctgttttcttagtgaaccatgaaaatgatgaatttgaattttgaatttttctcctctctcaggggcagataagagtagccaagaggcgggtcgtgatggcatccctctacctggggacaggtcctttggaacaggagctggtaaggtttatggggagatggttgtggcagcaatagtgaatgggccccaacatgccacagctttttgtgccatgcagttggtgtggagctgcctttccttggcctccatgtcagagccagctcttgtttttgttgccccagatatgggcatgtcaggagggcctggtgaggagagcatgggggagggcctggtgaggagagcttgaagaggtctggtctgggccttctaggcctcactggcagtgtcctcctacccacacagggccccaggcagctctgtctgccagttcagggcttggccgactgtggcctgccacctgttatggtgtagactgtgagctaagaaagaatggtttttacattttcaaataattggggaagagaaaaaataatattttgtgacttatgaaaactttaaatttctgtattggtaaacaaacttttgttggaacacagccacactcattcatttgtgtattgtctgtggtcactttcatgctgcagtggcagaacggggtagttgtgacagtgcccatttggcccgtaaagctccaaatatttactctctggccgtttacacaaaaggctttctgaccctgtactagacaaacggacctgagtgcaagttgggctggctggctcgttctgccaagggctggtgtcaagtgccagggctgcggccagccttgtttccctcggacttgctgttgtgccacacttgtcacttacagtgagataggtgggtgggaaggagccagcagtcaccaggtttatatgaggtgttggggccagcgcaggttctggtgcatggcgggatctgaggctcagctgaagtgagtctgtgaatgagatcactgctttctcttgggtctcctgggattgctttccgctcggtatagtgaaacagacgggcccattgcccagagttagtgccgtttcttggtctgtccttgttcagagttactggtgggagctatagggattggagtgtggagagggaggtgcagtgggttcacacctcccctttctgcctctcctaggaaggaggcctccctcttttttttttttgagacggagttttgctcttgttgcccaggctggagtgcaatggcgcgatctcggcttgccgcaacctccgcctcctgggttgaagcgattctcctgtctcagcctcccgagtagttgggattacaggcatgcgccacccccccagctaattttgtatttttagtagagacggggtttctccatgttggtcaggctggtcttaaactcctgaccttgggtgatgtgcccaccttggcctcccaaagtgctgggattagaggcctgagccactgcgcccggccgcctccctctatttttaggatataccctccactccaagcctggaagcctgtgtgttctcatgggagaagaatggaatgtccgcactgcggagagtggccagtgggcaggccgtgtcttggattcattcatctgccaaatatttactaagcactctttacgaggagggcactgttggttgtgtctgtgaggattgtctgtgttgaaatgtacgtgagacctggtgtcgtagcgtttccagggtggcacgggctggctgtcaggcagcacgcctctgcctgcaggtccctttccattcctggaggcctgggccgatcaggcccctgggtgcttcttctgatgatcatgaaggtgctctcagacagatagcttttgtggtgttggtgtccgagtgctgatggcacaaacctatctttggagaagatgacgagggcactagccgatggggcgatttgtttttctttaaatacacacacctctttgggtcttaatcttcttttctgtgttctttcttggtaggtggactgcctggaaagtactctagaaaagtcactccaagcaaagtttccttcaaatctcaaggtctccattctcttagacttcacgcggggctcacgaggtaggtggcatgcaagcctggcccctcctgcttcctgtgtcagatcctcagtcccaagaggggttactgtcaccccctcatccccaggcagagtcaaggctatttgaagatcatccaagctggcccagggctgcctgattgtgtgagttaggatttttttcttcagcaagtgactgaaagcccaactaaaaacagcttaggcaggagccgagtgcagtggcatgccctgtagtcccacttgcgtgggaggctgaggtgggaggattgcttgagccaggagtttgagtccagcctgggcaacatagccagactttgtctcatgaaaaactgccttaggcaaaaagactttttgtggactcctgtgactgatctgctttgggtggcttgtgatttggggtttggccgtgtcaccaggattcatcccctagctgtttcctttgggctggcttccttctcaggctctgtgtggtggcccctggtggcttaggcttgtctccccatgacaccttgtcttttggaagagtctgattccatgagaatcgggtcaaagctcctgactggcctgacggtggcatgcccagctgggagcttggagtgtgccgagtagcccagcccaggcctgcgtgctccctcatggagctgggggtgaggggcaaggtgggtagggtcgtcttcacccagagcagaaatgctgcgagtgggtggggtagtgccccaggagaaggttgggtgcagttaccaggagaagggtgaatgggtgctgtgtggcaagaagagcaggcgtctgccacgctgaggacttcaggcctgagacatggccagcatgcaggacagaggttggcctggaagtcctctggctaggagtagccccagctggtgtgactgattcaggtggacggcacaggtgaaggcgaggccacgtggaggtggctcctcattgggggcaggacgccttcctgttgtgagtcaggtgccgttttctctgtccgtgttcaggccggaagaactcccgcacaatgctgctcccactcctgcggaggttcccagagcaggtccgagtctccctctttcacacgccgcacctccgtgggctgcttcggctcctcatccctgagcgcttcaacgagaccatcggcctccagcacattaaggtgtacctcttcgacaacagcgtcatcttgagcgggtgagtgcttcccaccgtcagtgcttttgccctcctgctctgcaggctggagggcagtggaataggaacagtgggaaacccgttcccctcagtcttggagaacctgcttgtaggtctggctgctgtgcacccgcggcacctccccgacactgtctctgccactgaggctagaattccccgggggctgactggaagccactgttgacagggcacttagtctgtgctggccactcaggtatgttgtctgtttccaccctcagtgaccctctgtagtattttcctcactgtgtacatgtggaaacagatcagagaggatgagtcactttgtcaggtagacagagccagaaaaataaacaagagtcagacctggaagtccaggtccttaggctgataaatatgggccctttcacaggccctcccctcggcagtggggccaggattgggttgctggtgctgagagaaagcccttgattgcatccttgctctgggactgtaccagtggcagctgtcacttagtgggacagagagaacaaacaaacatgggcgctgataaatagccctgcatgggccgggcgcagtggctcacgcctgtaatcccacattttgggaggctgaggcagagggatcacctgacgttagaagttcaagaccagcctggacaacatggtgaagccccgtctctactaaaaatacaaaaattagctgggtgtggtggcacacacctgtaatcccagctactcgggaggctgaggcaggaggatcacttgaacctgggaggcggaggctgcagggagccaagatcatgccactgcactccagcctgggcgacagaatgagattgtctcaaaaaaaaaaaaagccctgtgtggttagttgactttctgtgtctgcatctcctcttctcagctacactgtcggctccttgagaggaggaggctgtgggtcactttgctgtgtcaccttggatcaactctggctttgtcttttgcacgtgttcattgctgagtagctatttgttaactgcatcttgacctgagtttgtcacccccctgctagttcacctgagacctgggtcaccaggacacgctgctgcatacccttgcctgagtcctcctcacctgcatcttccctccctgtagtgcaaacctgagtgactcctacttcaccaaccgccaggaccgctacgtgttcctgcaggactgtgcggagattgccgacttcttcacggagctggtggacgcggtgggggatgtgtccctgcagctgcagggggacgacacggtgcaggtggtggatgggatggtgcatccttacaaaggtaggggctgccgctgacacccttctatggctgtgggtggggtggagtgagggcccgggagagcacaactctaggtggttctgccacaggcataggggacttgggtggcaaggcttcattctgcttttgtccttgaagccagacagatgtgactcactgaccatcagtcatgctctgtgggtgagagagccagcccagaaaggtgggagcttgggcttgggactcctactccttgaggcggagtcactcaggtttgcactacagggagggaagacgcaggtgaggaggactcaggcaagggtatgcagcagcgtgtcctagtgacccaggtctcaggtgaactagcaggggggtgacaaactcaggtcaggacgcagttaacaaatagctactcagcaatgaacacgtgtgcctgggcgagtgacccagaagcctgccctgcatcacaggaagcaaccaggccagcagctgttcgcctagggcccatttccccaagcctatcacctgggcctgtggctcccagctcccttgagctctgtggccccctgcctggaaaatgaagtggaagagctctcagctctgcccactggaaccaggcaggttctggcgtgagtgttctggggcatttgcattcctgtgattcctgcggctgtggctcccccatggcctttagagagctgctgctggatttgcagcagtgtctgaacttggggaggaggagctgaagttggaacttgttgggagaagagctctctgcgtcttgtggacctagaatggaagcatttcagtgggccgtctggtggaagccctgtccttgtgtcaggggagccctgggcctcagaccccgaccgtgatggtgtgatgctctgcctgccgccatgcactgttcctactgttgtattttgaatttcatctgtaaagagcttgtggagctctgtatctctcttgctgagtgcctacctagcatcctcagctttgccttttggcccagaaagcctaaaatatttaccatctgacccttaaagaaaatgtgtgtggatccctggtctaatgtaacgggccaggcatggatatgagagaaaacaggccatgcttaggccaggatgagagccagcacgctccgagcaggagcggggagactcgagcccagctgtgcttgggagaatgagtccacagagaggctcagggtgtgcgcagggccccccggtgctcctccctccggcagccctgtccagcatgtggcagtgtgactcctttctcccctggagggtgttggcatcaacaggctagactcctgcatgggatggtccttctctttgttctgtagcccagccctgaaaggcactgagtgtctgttcctgcccccagctcagaccatgcaagccagcaaggatgacctgggacagccctccttccctgtttcacttccctgatcagccttgccaaagccttgttgttttatcaatcgtttatcagacaatcaactttggacagttgatattctccatttttgtatcattttcattctagtaatttctattcatatatatatatatatatatatatatatatacacacacacacacacatatgtatgtatatatttttgagatggagtttttgctctcgtcacccaggctggagtgtggtggcacgatctcagctcactgcaacctctgcctccgaggttcaagtgattctccagcctcagctgcccgagtagctggggttacaggcacacaacaccacacctggctaatgtttgtactcttggtagagacagggtttcaccatgttggtcaggctggtctcaaactcctggcctcaggtgatctgcccgctcctgcctccgtaagtgctgtgctgggattataggcgtgagccactgtgcccggcctgttcttatttttattttttgcttccctatactgtattcttggttttattctgttgtttctttcccctgtcttcctgagttggatgcttaactcattaattttcagctttgtcttgtctgataatagcatctttcccttcagtgtgtctgcatggtcacctgtcaccagtgtcttgtccgaatacaaaaggcaccccatgcagagcctgagcctgcccgttcttcctctctctcaggcactgtcactgctgtgggaagctttcccacatggtgatgtgcttatccaaggtgatggcttgccctgtgaccccatctgtggaatacgcatgctccttttttggttatacttgcatgtctttatttgactgagcttccttattgaagtagaacatgcaccccgagcaccagtcgcaggtgtacagccatgaacctgctgctagtggacctgcttcctggaggccccccgtatgtcccccccaaggaattatcccaaaggtaaccactatcctgatttctctccctgtcagtttgtcttgcctggttttgagcttgtttgtaattggaatgatacgtcgacatgcctttcacttctgcctgagtgtgggctactgtggaccaggcccttgtcttgggcaaactatatccccagaggagcctcgctctgggcttggggtcctgggcccactcagcgagtgttcagtgaacatccagttgtagcgtctgcacttgcctatcacatgccctgtcccctgagctgggcagagtccagaccctccatttctcttcccttcactcttctttcacgtcttccccaggggaccgggccgagtactgcaaggcagccaataagagggtcatggatgtgatcaactcagccaggacccgccagcagatgctgcatgcccagaccttccacagcaactctcttttgacccaggaagatgcagcagctgctggggatcgcagaccagcccctgacacctggatttatccgctgattcagatgaagcccttcgagattcaaatcgatgagattgtcactgagaccctgttgactgaggcggagcgcggggcaaaggtctacctcaccactggctatttcaacctgacccaggcctacatggacctggtcttgggcactcgggctgagtaccagatcctgctggcctcaccagaggtgaatggcttctttggggccaagggggtggccggcgccatcccagcggcctatgtgcacatcgagcgacagttcttcagtgaggtgtgcagcctgggacagcaggagcgggtccagcttcaggagtactggcggaggggctggacgttccacgccaaaggtgcgcagcggctggctggaggacgttccagtgtgggacagccacaaacatgggcagggggtggggagccctggcgcctacctgttagagtgctgtacttctcccttcctaccttcccagcagcccttgcaggcacatcatagctgtcccatgacttggggagaggcgagcattcatctcctcaagggaattttttttttttttttttttttgtgacagtcttgctctgtttcccaggctggactgcagtagcatgatctcagttcaccgcaacctccacttcccggttcaagcagtcctcccaccgtagcctcctgagtagctgggactacaggcgcgtgccaccatgtctggctaatttttgtatttttgtagagatgggattttaccatgttgcccaggctggttttgaactccggagctcaagtggtctgcctgccttgcctcccaagaagtgaatttcagttgtgtaaaatccgtctcttttatgcatcaaagactgtatatggtcacattatttggtggctgtggtaaagatgtggtgacataacctctcctaagagatggagaggaacatgccttagctgtgagatggaatgtcactcttgtcgctcaggctggagtgcaatggtgcgatcttggctcaccgcaacctcctcctcctgggttcaagcgattctcctgcctcagccttccgagtagatgggattacaggcctgtaccaccacgcctgactaattttttatttttagtagagattgggtttctccatgttggtcaggctggccttgaactcctgacttgaggtgatccacctgccttggcctcccaaagtgctgggattacaggtgtgagccaccacgcccggcccttagccttgtgttgattgtcagagttcctgcttgttggcaactttttttttttttgagacagagtcttgctctgttgcccaggctggagtgcagtggcacgatctcagctcactgctacctctgcctcccgggttcaaatgattcttgtgcctcagcctccctagtagctgagattacaggcatgcaccattacgcctggctaatttttgtatttttagtagagatggggttccaccatgttggccaggctggtctcgaatgcctgaccttgtgagccacttgtctcagccttccacagtgctgggattacaggcgtgagccactgcgcccggctggcaatgcctttctcagggagaaagaagattcattagggatcatttgttttggcatcagcagcccagttttcttgtcttttcctcactattgctattgtttttttccctatatgccaatgtctgccttttttccccatagctgaggaaatggaggctctgtgcacagtcttgctggtgggggtggtaggaagagggtcacactctgcaatgcatgtttatccctctcaggcatctggcggagcagccgaaatggggcagaatcccaggggcagctctctaagacatgggtataacatgctggaaaccctgtgcttagcagtgggcttactgcatggcctcttaatgctgggagggtgcccgcctctagcagcgggaccatgactcctttctgacgctggggacccccaatcctggagctagtctgtctagagaaggggaaatggtgcctggaggcccctgtgccatgagtacatcccacggcttttctggcttctccctgggcagtccagaggcctgttttgctccttctcttgtcctggttctagtggctttcggaagagctgagtgagtggggggcctccatggatggggaatctaggctgtggactgcagtaggcacacagctgtgttgttgagactcgaggcatcttccggtgctcaggtggtttgtttttgtttttgttttctttaaaccaatgtttttcaattgggggatgcgttgtaagaaatactgaagccggccaggcgcggtggctcacgcctgtaatcccagcactttaggaggctgaggcaggcagatcatgaggtcaggagatccagaccattctggctaacacggtgaaaccctgtttctactaaaaaaatacaaaaaattagcggggcgtggtggcgggcgcctgtagtcccagccacttgggaggctgaggcaggagaatggcgtgaacccgggaggtggagcttgcagtgagctgagatcgtgccactgcattccagcctgggcaacagagcgagactctgtctcaaaaaaagaaaaaaaaaactgaagcccaggttcccctagactttcatccacctctgtggggattgaacccaccatggtgtttaaaaaacgcccctaggagattctgatgcctagcctagccttaagaaccactgtcccagcttggaatgggaagcttctggcatgtccagggcatcccacgtgctgctttgaggcccacaggcctgtctaggcaggtggcattgtttggtgtgggaagtgactgccacactgtcctgcaggacccatcctggcatgtgttgtggctgaaccaggctggtggtcagtgtctcagggcaggtggccccagcccgtggcgggtgtggaaagtatttttggattggcgttacttctgggaataacagcagtacccagggatggggtattgaaagagttggccagtggggcagctttgacctttggggaggcctcagacccacactgtcgtgtgctggagaggtgcagaggagtggctaggcgtcgctctcctcaactgcactgtgctggaacgatgaggaggccccttaactcagcctggagggtgggaggctcctggcctgtggcttctgactctgccacgggttatttccctgaagtggctttgataaacgtgagctgactccccagttaccgctgaaacagaaacacccaacctgcttttctggggcgtcttgccttttcccggactgatgtgcttctgccactccctctctcctgccctggtgtgggtggtgttgggtcggggcggggggtgccctgcaacccaggagtgctggatgagtgggaaattggggatgatcttacagctggatcccagggcacgtgcccatgtgggggatgggattgggggagagttggcagaggtgggtgagggatggatggtgtgtggagggggctgctgctgagcagaggggcttcaccctaaagccaggaaccagaggtcagaggtcacttgatgctgaagtgagaggcgagggtccttccctgctcagtggttgtgtccccagtgggatcttaagtcagcacctcttcaggcccatcttttgatggtcacttcctccagggcagcgtgtgtcaggtgagagatgagtgggcagccgcagggtgcttgtggatttcgatggctggcccagtggaccattcatttcctgactgtctgccctttgcaaggcacttgctgggtacaggctctgtgcctccttgggtgtgtctgtgtttgggccccagaaaattcctgccggtggctatgcactgatacctccactcccttactcaggtcctgtaggacaggcctgggctgatctcagctcctcctgctcccagaagcccttgggcagagacaggtagccaggactctgtggattctagatccttgcccctcagacagcactctgctgtcagcacagcactctctgggagccaggcaacaagaggcttcacggagtgactgtgttgaacttgctggtggccccatgagtgtggtgatgcaaggaagagcagcgtggggggaagaggcaccttctcatgtaaaatgaccccgtggctcagcagctgccagtggatttcagtgcagtctggtgacagaaaattcagagggctggcctttattcttaagggttttctgtgttgtcaagtattgccaggactgtctggcagttgcttagatgccttgttggaaagattcttgtgtgataaccatttgccgatcgttcaacagcctgatacacctcttttgcatactatgctgatttcttaacatattttatctatcaatcagtcaatcagtctatcatgtatctctatcacatttcaataaattgagctgtttcaaagaaccagaggaacactcaactatttaaaggcatgcactagagacttcttttgcaatatggtttatctatttcattcttatttggatttttgtaaagggtgcctattcagaatactcaggagaagccatgcaagtgtgatttggcatagggattactagacttgaagtctagaagcctggttctgagtccacatttacctgtggccacagctgaggggcctggcttaacctctttcctgtgcagtcggggggatggctctagattgtcaggaggacacggggaacagggctgatatttgactttctataaaataaccgtatggttcctaggccaggtgaggcaccttggtggggcgcgtggaggttgaaatcacactgggggccgagggctgctgcgcgtccctgagcgaatagattggcagaagggagtggggtgggggccttggatcccttggtgccgtgtctctggccttgctccctgtagttctgttgcgctgattcggtcgtgaaggaaggtgctgccaggccgcttcacctgcatcgccttggctttgggaggtggggctgagtgggcatctgggttggatctcaggcaggtggcagttcctctgattcatggttgtcagtttcctgttgcctggccctcgctcctcgcccagtaggtgtggtgggacaaggttctgggagctggggtagaatttggactcttaacgggaagtgcctcgtgctgccgcagacacatctggatgggtgctgagctttccttcccaagcctggtcctgatcgggggtggggtacaggcaggagcagcccggccttgtcagccgttgaaagtgtggtatctgctgggttgccagtaagctcgcttcgaggtcttgagaggcagtgcaggggaggctgagtatgaaccgtgtcaagccagttcttatgtctctcttcatctttctgctccatggaggtgagggacagagtgagtggtgcccatcccattatcacattcaggcaggaaccatgctgtgctgagccaggctgtgtccatctgctgggacatgggctctgccctccggcgtgcatttcatgaggaagatcagaaagtgagttttagcatgttgacttccatttcttctggacgcagtattctagcactaacaacacaatgtgggtggctagggcggagcaggtgttggattaagagatttctggctcatgctgacagggaaatctgttaatggttgtgagaatgtcactatttttattgccttcctgataggccaattggcgttctgcccaaaggtgaactgatggtgagaggcgggcagccccaccctgtttgcctaggccacacgtgaggcggctctcccctgggcacccagtgggtgtggtaggggtgctgtgcccgtgcaaattgcttgcttcaggctgagcacacacaccagcctgtgggcccttacagtttctcagagctgtactaatgtcagagcaggtgagtgcttatcctgtaaggataagcctgtgatgtcttctgtcccctccgtgtttttactggagtctgagaaccctgtaagatttattgcagaatactgtgggagtgcttgagggaggagtatgtgttcatgcatgtactcttaaaatgttcatacacttctgccttagaactgcaaaggcctggcgtggtggctcacacctataatcccagcactttgggaggccaaggtaggcggatcacctgaggccagaagtttgagaccaatctggccaacatagtgaaactgtgtctctactaaaaatacaaaaattagccgggtgtggtggtgcatgtctgtaatcccggctactcgggaggttgaggcatgagaatcacttgaacctgggagacggaggttgcagtgagctgagctcgtgccactgtaccccagtgtgggtgagactccgtctcaaaaacaaaacaaaacaaaacaaaacagaaaaacaaaataggccaggtgcagttgtgacttacgcctgtaatcccagcactttgggaggcagaggcgggtggatcacctgaggtcaggagtttgagacccagcctggccaacatggtgaaaccccgtctctactaaaaatacaaaaattagctgggcatggttacagccgcctgtaatctcagctactcaggaggctgaggtgggagaatcgcttgaacccaggagccggaggttgcagtgagccaagatcgcgccattgcattccagcctgggtgacaagacgaaactctgtctcaaaataaaataaaacaaaaccaaaacttcagagctttttttttttttttttttttttttttttgggacggagtcttgctctgtcacccaggctggaatgcagtggcgtggtcttggctcactgcaacctccgcctcctgggtttaagccattcttctgcttcagcctccccagtagctgggattacaggcacgcaccagaatgcccagctagtttttgtatttttagtagagatggggtttcaccatgatggccaggctggttttgaactcctgaccttgtgatctgcccgccttggccccccaaagtcctgggattacggggttgagccactgcgcctggccgtcagagctttttttacacttaatttgaccttttttgggagagacattattactctcagtttgtttatttcattcaaacagatatctaacaaataccagctgtgtcccaggcatcattcgggacattgggaatgggtcactgggtaccagacagactaactccctgccctcctaaggcttatactttgatggaaagcagataataagcagatgcgtctctacaaatatcggaacgagctacgaagagcagagcaagagaaggctccaggctgctgcaggatctgttacaagggggctcagggagggcctcgctgaggagtagacactcgggcagttggcctgagtgaagagggagcatccatgccaccgtctggggccggagtttcctggcagaggggagagaaatgaggagcctcctcgaccacatggggcttgcagaacagcaggggcactgggagtggtgggcactgagattggagggtgggcagggcctattggaaagggcccagaagccatggcacgctgccatggaggccaggagtgccgaggcctggatcagccttccgcagggcagtatgactgtgcagaagagcaggggcaggcgtcctttctgaagaggaggcccagagctgggaggcagcagcagtcccaactccaggtcctcctctggtgtccccgcgacacttgatttatagtgagtgagtgtggagtagcagccgcctctgcttcccctgcaccctgccctctctggcacccagggctgcagtatttatctctgccccatgaactgccagcagtcagtcccttcccaaaagcacttggtccgcagagggctgcttcctccctccccaggctatcgttcctgctgcacgtctccctcatctgatggttcctggaatagtaaagatgtcaggcccaaaggtcaggccctgggatgaagagtcgggcgtgataaccagtttacagccttggactgggaaacagatttcccgacagcgagtcccaggcctgatagtcttagccctgtgtatacacagcctgacatcctgactggtggtgcgggtctgaccggagctccagaccgctcaggcctagagcgagggagatgaaacagaactaaagggctcctgcttttttttttttttttttttttttttttgagatagggtttctctctgttgcccaggctggagtgcagtgggggtaatcttagctcactgcaggcttgacctctgtaagggcttttagattccccttctcccgttggaaacttcccagttgtcctcagggcacagaccaatggctaaaactgacttgtgagctgaaatcttgaaaaaccattgttcccagctgccctggcctgtggggcatgctggggtgtgggcatctcacagcagcaccccgtggcatctctggacctggcaggtgcttgactcatgctgtctacttagggctccccagagggcatcagactggcctgtggtcgttattttctttctgatggagaaagattgcagtgcaaataattctggcggggaagttgttgggcagtctcaggtatgttgaaaacgtgagctacctctcaaatcctgagcactcacctgctgaaaaacccttattctttctatatgggaaacatagatagacatagagactgtctacagatacgtatacagtctatcttggggtcaggaatgagcaatagatggagaagcggttgtgcgtatgatgaagttgtgcactggaggtggcctgtctgcctcagcgctggcctctaggtggcctcataaagaaccgagccagtgcttaggtggatttggcaaataaaaagcatgtgtagaaccacgcacctccagccttccccaccagattctgtggtctaggagctgtggggtggacaccgagtcatggtggcgtgacacagagcagcctgaccctcgtcacccatgtgggcgtgtggccttcctactcatcactgtcagtcttccctcagtgggctcaggagatccagctggacaagccacactgaacagacccactgttttaagaggctgatcttgtcatcagaaaagttggaatgagcaatggcaggtgggaggaagctcctgtctcaggtctgaggctggcggacgcctgccttgcaccttgtcttgccagctccatgctctggggaagagggggtgggaggggggctctgtgtacgaggggccatgagtgctgttcggcttggaccaacctgggcagcgtgagccatctggatcagagccaccaggggaagggggcagcctgcccacacctgtggtcctgtgaacggcctgcacggccagtggcccagcggagcggtactgtttatggcacaatgcacacaggccagcaagtggctttgatgtggcccttggaggggtggagacgagcccattacaggaacaggcgtagggcctcgtcacctcttacccaagatgttcttggaaatgctcttgctctgagtgaagattaggaaaccgtcttctattttaggagcctggtgtatgttacatactgtgttgactcgcccatgacagttgtgtgggtcctttgaaaggggtgtgtcagtgg[450 bp omitted]aacggggcgcaaaactgtgcttgtcatctcaggtaacacgtcagtattctgaggacgcctgtggccttgttacagaaatggcctcgtagtgtggccccccctgccacacagtggcaccccgtgccctgctttttctccaactgtgatactgactggctcatttcccagcaaaaagggggatattgttctctgggtgtgacagaaacttacagggccctttagctttctcctccattgtcttttccagccaggaagtccctgggccctgtgggcagtgatggcagaggtcccaggcctggaccccctttgtcctcacagggttttggtgcatcagcaacttgaaatagggaggctgggtcagggagactcactacatgttcctcagtcagaagggcacagacggcctacccaggacctgtaaggcagccagccttcaaggcagacctgttcttaccagccacttttgccaccccgcgtgacaaccccacatctgctggcttgggtcgcgtggttgtccttcaccatctgccgtgttgcgcgctgaggtggctgcttctgagaagcacgcgtgagctgattctcagtgctcacaggaagggatggccagtgcaggctctgagcttagcaggcagggtcagcaggtctggatgtgcagaggcagttcagagtggggttcgaggccctgagctctctggggagaggctcagtgggcagctgggcaggggtgtatgagagcaggtcggcaggtggcgtcaccatgttccctctgggaaagcctgcttctcgtcctgcttgggacacaaggccacagtgtgaatggtgaaagcaaagaccagcagttgagctgaggctgcgccctgatcctgggtccctgcttcctgccgcgccggggtgggggtggaagagtgagtcctggtgtggcctgtccgccgctctgcagcagcccctcgtgtccaggcacccagggcaggccgcctttctcttagattgcagcagcgtgtggagaggactttggtagatgctgtgctcatttcctgtctgcacgtttccttttccccgcaggcctctggctgtacctggcagggagcagcctgccctgtctcacgctgattggctctcctaattttgggtacaggtcagttcaccgggacctggaggcccagattgcgatcgtgacggagaaccaggccctgcagcagcagcttcaccaggttggtcgcagcaagtgggatttcccagggcgctgagggtgtggctgggggcccaggctcacccgtgctgtggggctgccctgagagctgtttcctgaggcaacgagtgagactcagagcagagcaagaaagactctgggtctccaagagtgcagtgatgggtggctgagccttggaagatcatgcctgtgacttcccagacgcgttgcaccccacgtcctggggactttttctttctctgcactaggggagaccaccattttctccctgggaccttttccttttaagacaaagggtcaactgttaaaggttcggcattggggctgggtgtggtggctcatgcctgtaatcccagcactttgggaggtcgaggcaggtgggtcgcctgaggtcaggagttcaagaccagcctggccaacatggtgaaaccccacctttactaaaaatgcaagaaagtagccgggcatggtggcgggtgcctgtaatcccagctactcgggaggctgaggcaggagaatcgcttgaacctaggaagcagaggttgcagtgagccaagatcgtgccattgcactccagcctgggcaacaagagcgaaactctgtctcaaaaaataaaagggttcaacagtggtttcggccctcgtttgataatagtagcccattttctctttgagggagataaaagaaggttaccaggagttggtgaatgcttcgggatgaccctctatttgatgacctgtgacagtgtggttagacttttgaaatgggagcgtgttacccttttgtctgagacctcgatggtgccttgggctcatgaattcgtgacctttgcaataacacttttccatggaaggcaccaacttcccttttccattcctggagatgcagataacactgccgcaggccagagcccagaggcatcggacggtaactttgtgaagcttttatgctccagggtttgggaataactgttgcaaaattgtcagagcctttgttgatggacgaggaaatggtcactgatgtgttccctgggatctgtcctcctgcagcctgggaatcttgtcagtgactgattgattggggccttggtgccaggaaaggcttcacgaccacgacaggcgcaagaggaagtgaagcggtcatcctctgggtgggccagtggggtaatgggtttgctcaggtttcttcctacagtgaggtttacagcaaatgactgaggaagcccccacaagctgagagattccagtaatagggtgacaagctggccttggagccaggctagtgggaaagacctgagcctgcagctttcaacagcgggctttcctggacttctacttcaattgcagagagccgttcgcagagacttccactgtagctctgtgccagggcggtagagagtccttggtgactttggccaggggccaggatgggttctgcgtggatctgagttgcttgggggagcaagtcctccaggcctgtgcctggggtcctggtactgaccgtcctcccccactgccctagtaagggcactgaacccacatcctggatcttgagaaaagctggggccgcctgtggttagcagctgctttctcaaatgacatatttgggatattttctttttcttcccaaacctgaatctcaggggcttttgcctgtgggagggtggagggtggtaggtctgctactgtagctcttccattctttagggatagactgatttctctgcctgtgaaacgcagaaatatgtttccagataattccacctatgcttatatactgggacggcagctgctctcctgagccctacagtgcccggtccctagaggccaaatcctgctgggactgcccagcctctagcctccccacaacccagaaagtccctaaagccccagccaccgtgggctccctgctctctgaagctgtctctggagatctgcttgggaattcagggaggggccctcctattcatgtcacattgggcactgggaatggggagatatttttatcagaatctgaagcccctccctccacttagtacatacaataaacactgaaagcttcctggttttgttcagggaacacagtttaccacttgtgacccaagaaagactccctcgaacagcgtcgtaacctcgtcagctgacttccttctccatccctgttgtggagtctgtgaggaaacctaagtgtttctggtaatttagttgcaatcttggccgggtattcatttgaagacacaaagctggagccaggtctgtggagactcctgcaaaccagccccctgagaccagagctggctcttccatcaggcacgtccagccagggattgggacctcagcagcaattaggaggccccatgtctgtgacacgcggggctgcggggctgctcagttgggagtgtggcatggacccacgatggggcccactgagcatgggacgggggcagggggtaatgaagtcggggcctggctttccccagctcttgatgggaaaagccaaggccacattctgtagggttctggagtgtggggtgaccccttcctgaccccccggggcagaggagttgccagggctgtgtcctccctcccggcctcctgagcagggagtgtgccactttgagtggcacaggccaccgctgctgctgtcctgcggttggcactgtgcttctgtggtcatcacctgtggtcctcacggcggtgtggatgtaggtatggcccggacattacggtggagagcgctggagactcagtggaggagagagggctagagtcgcggtgcaactgtgtgagcgctgccaggcgccccactgaggacactgaggagagagcacttggagggcagactcttacaagagaagcttttcaaagatcccaaacaccatttcggacaaagcatatataaatttttttttttttttttttttaatggagtcttgttctgtcgcccaggctggagtgcagtggcacgatctcggctcactgtaacctctgcctcccgggttcaagcgattctcctgcctcagcctcctgagtagctgggattatgggtgcatgccatcacgcccggctaatgtttgtatttttggtagagatggggtttaatcacgttggccaggctggtctcgaactcctgacctcaagtgatcctcccaccttggcctcccaaagtgctgggattacaggtgtgagccaccgcgcccggccgcatatataaatgtttttaaacctgtttttaaatatgaaattaacatgtgttcactataaaaattaagaaaaacggaaagaaactaaccctttctgtagggaaaaccactgaagccattgtgatgattggccgcctgccttctgtgtacagcgcacggaggcacagctttaagcatcagatgacgattctgtcgtgtgtgtgtatttcgtgtccagcttcctttgcctgccgatttctgggcactttcccatatgattaggtcaacactcttctcatggcgaaaactggtttgtcatatgagttgttaataagttcgtggtgaatgctggtttgtcatatgagttgttaataagttgactgttggacatttaggtggtttccagtttttccttgttataaatattgtgataaatatctgtatataaaaatcttagcgcatagtgattttcttggggtaagctcttgcaaagggagctttataaggttcttgatacctgttgccagagctcactctagaggatgacttgtcccccttgccctcagcactaagcgttcatcagtgtgggggataatgacatcacagatgtcattggcacaaattggctttgtgccaatttgatagaagaaaaactgtgtctcatttaaaaaatacctcattttaatatgcattacctcgtttagtgagggtgaacatttaaaatattttttccaccagttatatttcttcaactctaaattgaagaaatttagagtcctttacatgtcttggtcttaaaagccttttgggttttttttttgagacaaggtctcactttgccacccaggctggattgcagtggcagcatcacagctcatgcagctttgacctcccgggctgaaacccttgcctacctcagcctcccaagttgctggggctacaggcacacaccaccatacccggctaatttttagaattttttcatagagatgatgtcttccctgtgttgcccagggtggcctcagactcctgagctcaagcgatcctcctgtctcagcctccaaaagtgttgggattataggctttagccactgtgcccagcccttaaaagtctttaggaacacggcttcttagcttttctaaggaatgtttgacagtggcaacttgtagggcctggccttgcctgccaccagagcaccctgggaatctctgggccaggtagacatgggaagtcagggttttctgggctggcctgaggggctgggctggggccagccggccatgtggtgtggtgctggaggggactcctcactattcctgtctgttcctcttcctcaggagcaagagcagctctacctgaggtcaggtgtggtgtcctctgccaccttcgagcagccgagtcgccaggtgaagctgtgggtgaagatggtgactccactgatcaagaacttcttctgaggacagacaggtgctgtctctagcatcacctctcagcacgattttcccgagagttcacaggtggggcaggtggttgttctgactcaaccagagcttccagagggctctttgatccctttctcagttaaacacagagcagcatcttcaggggtatggcagctgtcctcaaagttagaagctggatgctaaattaggcagtctgttcactttccatctggtacccactccactaagtcccaaggcgcctgtgctggggtcggcagtggcagcctgtagtccccttctgctctcccttcccagggggtcctgaagaagccctggggcaagggctcagggatgagggggcagaaaggcagattgagcccctccaagctgagcacactggtgcaggagatgtagacgtgggaggaggggagcacgtttgctcgtgagagtggctctggcttgctgccctggccggctgtagtgcacagggtggggcgtcggtagagccagaccgtgggctgctgcctggacgcctcgctgacatccctgtgctgcggttacagagctgcgcccttctagactctggaagttgagtaacaggacctgctctgcccacccaggaggggcctgccgcttcaccagaggcaccagtggggtcccacagtcacctgaggtacccctggactgtcttgacgcctagaggtccgggcagggggtggctgccattaaaggtggggtctttgctgagtgaccttttgtgtcctggatccctcagggcctggactgcactccgggtggggtcaggctcccgaggcccctgctctctggttctggatgttgtgggtagttctgttgctttggatggctgggcctttggatggtggcttgtggggaagggacggtgaggagtcaaagatgagccaggacccatgtggccggcacatgcgctagtgccggcatctcatgtgtgcagcgtgggctcccttagtgcctggcaccttagtgctctgctaagtctcattgtttaaaaatgtgtagtttatctgcagcttttcctagttattttaattacttttcattttatttgaatagtgtgtgcaaatgtagagagtaaaacaatactgcggccatttcctgccctcccttcccccaggcagccactcttggcttgtttcttctgatgtgcacacgtgtccgtatttctaaataacgtgcatatcctgctgtcttcccccaaaatgtgtacttaaccaaaacagcaccagtgtcactcctgaaacaaaaattaccaagaatgtcttagtatcatcaaatacctaaatggtgttcacaattccacttgccttaaaattaattttttcgattatttgacttgaagtccaattaaggactacaccttgtgattgttttttccctagcaatttattttttgaagaatgaactttatttttattggatctacttaaaacatttttgtgtcacctagtagcaggggattttgaatacatgtcatgtgtgtttataaagccagctctccatatcccccagtgtctccaggagctgcttttgtgacctcactgcctgatctctttatcatcttcaggtgcttgacccttgcacagagagaagcttcctgggctacagggcatggcagcctgtcctttcggggagtgagattagatttagtccctgcactttgcctctctagaagcagcttctcgcctttccctcccgagggctggcaggagtcactgtcacccttcatggggtctgaaaggttgcataggctcacctggtcttagacaaggacagttgcagcttccgcaccaggcagacctgcagtttgagtggctggggataggtggagcggcggcctggccacagtgccctggacagcagcacatcacatcagttaacactgtttgccttccaactagttattacggtgtcctgtgggacaattagactggaggagccaaaggaatgtgcaggggcactgggtttctgtttggagagaggctctcggtaaacagagttcgcattcctccagattctgtgggaccagagtaaatatcattatgccacagccaggcttaagcaatctatctgcagtgccgttcccgcagcgcacactgctccctctgtctctgctgatgaccttcgaggctgtcctaggcaggttctccctgaggagctccccacaccaagcctccctaactctgcaaagcagccggagcaacagagagcagcgggcggcgggcggcggccgccgcagtcctcccggctttctaggtgcgcggggctgtcgtgttccagtccctgtgttccccgtcgctggagtgcagcttaagtgcgaatcatttcttggaaagtttagagataattttgtcaactacccacaatatgtatgtgtggactagattactttcttatttcaggatctaaaggcaaaatggaaaaacgtcacattttgtggttattaccagggactgaagtgagttgcccggtggcccctggtggctttagctcccctggtcacctgaagggctgcagtgacccctcctggccagcagaggtattggcccagccaggctgggggaggctgaaactgcttcccttctctgcagccacaaagggctggattccttgggcgccaggaggggaggatttttcttttccctccgatagccctactgggcgctaagattgttgtgaatcattaccctcagaatttggactttctagatgcttcttaacccatgatttaggtgagtaaacttggaaaaatgtttttgcaaaacttgatgatcaagctgaacgtagaacgatattcctaatgggtgtgtttgccttttttcccccttttgagacagggtctcactctgtcacccaggctggagtgagtggcatgatcatgcctcgctgcgtacttgacctcatgggctcaagcgaccctcctgcctcagcctcctgagtagctgggaccacaggcacatacaacattcccagctaattttttgtatttttgattgatagagatggttttgccacgttgcccaggctggtcttaaactcctgggctcaagtaagattgccgtcctgggattagaggcgtgagctgctgcagcggcctgcttttctttgaagcctgagaaatgttgagggccgggcacagtggttgacacctgtaatcctggcgctttgggaggccgaggttggtgaatcacctgaggttagaagtttgagaccagcctggccaacatggtgaaaccccatctctactaaaaataaaaaaattagctgcgtgtggtggtgggtgcctgtaaccccagctacttgggaggttgaggcaggagaatcgcttgagcccaggaggtggaggttgcaacgtgagccgagattgcgtcattgcactccagcctgggcgacaagagtgaaactctcactctccctcgaaaaaaaaaaaaaatgttgatcctgtcttggtccccctgggatccgtcttttctgacgtttgccgctgtctcccctcatcccccaggttgctagttaattctctcccctcgtgcctgcaccctgctgccctagctagcctggccacctcactgccgtgtcctgcatcagcccagccacagagtcctacaggtccggggcttgcttgtgggaacggcttgttcttctagactctgggggcgggggcttgggtgtgtttccttacttgtaaaaggtcctgttgtttttgggagcagggagtaatggcggatgagacgctgtgtggaggcggcagctcctggtatggggtaacgccctgtcccctcattggcaggtggtttgcatgaagcatcaggccagagggtgtgagtgccaagccctcaccccacatgctgctcctgttaaaagcaaactccactgacccccccgggaagtcaggatttgggatttacttcctggaatgcttgcctctggctgctgggaattggggcctttccccaaagcctgaaccaggcctcacagtggccatcaggcacagaatggatgggcacagctgagtggctccactggctttaatctgccccacctcttccacaccaacctccaccctctggttccgatgtgcttggttacaaagcacctgattatttaagagaacgaaaaaccaccaccagttcctgtaaagaataagtcacaggtgcacaggtgaagggctgagttgtggtccagccccagggagtgtgggctgtgaggcaggagcgagctaaacctgtaggagcagcgccacggctgccaggatccacttcgctgccttctctttggtcttcaagttaaaggtccagacataggtggggccgcggatgcgtgttttgtacacgggacactcatagatgttcttggtctccatgcggtccacaggaatggccttgatgaagatgacaggcatggccggggtcagctctttcagccgcgcttcagcgatgactccagtctgggtgtcccagcgagcccctgcagggacagtatggctgagggtcaggtgtgctgccagtaagtgagggaggggctggcaggaagggtggggtcctcacactccccgccctctgcagagctgggctctaccccaaaaggcttcaggccagctgccacggctggaagcagaggccttcgtaggtgatggcctgcatgttgtaactaccccgtcccgctgggctcaaggaacagctcagctaaagccctcgggttccatccgtttaaatctgtggcattttcagagcctcatctgtcagccttaatgtcagtggcaggaagtcataactccagctaaaaattacagagtaaagttccctgattcttaatgtgtaatgtctgccctatgtgtacatacacaatataattatacatctgtgcatataaatattgcctttaaccagactgctattatttctactcgccctatttaatggtgtttttatttcctgtctgaaatctcaaaataaacaaacatggagagcttatctttggttgtgtgggaaatggggtgcctgagccgttgctggcccaaccctgccaccccacaggtaatggggtgacgtcagctgttgaaggggacaggtatgtggtggtggcattgctgctcaactcagaggcgggctgagaagatggccggcctcggtgtcctggctgacctcttctgtgtagcaggacaggggtgatgtgggggcggacttctaacaggtgccccagcctcttttcccttgaaccctgtgttccaggagtggcagcagctggggagtgggtgagactgggccagccagcatgacctggagtctcagtgcagccacaaaacgcacttctgccctgggctgactgctccgtggcagggaaagcctgggcttttcagcgcttttcatcacgtcggagctgctctctcacaagctctgctgttttcattaaagcagaggccaggtgactggggtgtttttggtctcctccagaccctgcacattccctgaatcctctcaaccctctctagggtcagcgtggctctgacctgcaggctgatgccccctgagagcacctctctcctgcctgtccccacagctcttgaacagcctgtctttgccaagagctagttttatcttgtcttggcaagtagcactggctctggaagcttctgcagacagacaagagccctccttaccttccatgaagagtccgtacacgtaggagccctctcgcggaggagcggtcatgtcctctcggtttttcttggtcacctcgacagacagacacatcttgtccaggggccactcgttcttcctggccatggactgcatgatggccgtgaggaacgactgggggttgaagaagccggccagccacacggtggtgggcagggcaaagtctgtcgtccaggcctcgagttcctgcaaggacacacgagccgctaggaggagaggacatagaatgacatgggaacgaccgggccttggccgttctgagcaggggtcacgccagaaccttccacgggccactcagcgagctagaagtgctggacagagtaggggccatggagcccagccacctaccatgacgcaactttggtgtctgctttttttttttttttttttttttttttgagatgaagtatcgctctgtcacccaggctggagtgcagtggtgcaatcttggctcaacgcaacctccgcctcccgggttcaagcaattctcctgcctcagcttccagagtagctgggattacaggtgcaggccaccatgcccagcttatttttgtatttttagagatggggtttcgccatgttggccaggctggtctcgaactcctggcttcaagtgatctgcctgccttggtctcccaaagtgctgggattacaggtgtgaaccaccgtgtccagctgctgtttgctccattttaaacaagggaacaggtagagaagggtcaggaagaaaatggcttcctgtttgtggataatttaggagcccaaagaggctcttgccttcattgcctcgctccttatagaggacggcttaccctttgagggtcgcttgaggaggagctgatggaagctgctctgcggcctggcttgttttcctcctttgggaggaaatggctgcactgtcagggtgtgggaggggcatgggctaggcccttctggccctgatctgacagaggacaggcccccaggagcctcctggccatgctcctgcaggctctagggtgtggggtgtgccgagctctgggcactcggtccccgagtcttaggaagcctctcagagaaaacggcacttaccctgatgcggagcagcaggtctgcgtaccaggccgccaggcccatcatggaggggtaggcccgggccacccacgtatcaggcacggtgtcatagaagagagccgtggacagatcttccacgtcggtcgtgatggtcagttctccctaggagacacacagatgggtgtggggagccctgagctggggcctgggagagcaccagccccagtgcgtgtcatgagttgtcaacacagtgtggctttgtgctgcgcctctggagacgccctgcatcagggccacgcaagcgcttcctgctaaggaacggtctagatgagctcccggggcttgttctggaactgccagagctctggagagggagcagtaccatgctgatccggggcctgtgctaggcctgggttgccagaggcctgggtttctgctggtttcaccatccagccacgtccctggggccgggctgacccatgtttaccttcagccccaggttcagctccttgagcgaacggcgcatttcgttggtcaggatgttcattctttcacattcttgaaaggcgactaccacgtagggggtcttttccgctgcctttgccatgatctcagccatgttgaaagtctccggaatcttctccaggatgtcgtccagcacggccttcacctggaagccagtccccggacagcccctgtcactgcaaagagcccaccccacccactgcagggtcagggagcctgcccaaaatgttcccagccccaagtcctggagaggagggaagaggcaagtagagttgccagaaatgcagggtcatgggtgcagccacacatttgatgaggagagggagccttggccagcggctccgagcattctgatctcactacaagtccctgcagccgcggccatgagcgcatcaggccacctggctcggtgcctcatttgttcattcccacgcaccagcctctggtcaaatgtagccagcggttgagggattgcgactttgtcctttacgtgggctttctgtagggaccatgctggtcacaccctgttaaggagtggcccacacagtgcagtggtcacctgcaccaccgtctgtcagccaattcctgatttcagtcattagactaagagaaagtcctggacctaataggaataagggtctcacatcaagaattcagtctttaccgggaagtcctgtacttagctagtacgtaatagagcctttccacattctattaagaagtacaggccaggtacagtggctcacgcctgtaaccccagcactttaggaggccgaggcgggatggtcacctgagatcaggagttcaaaaccagcctggccaacatggtgaaactgtctctaccacaaatacaaaattagccaggtgtggtggcaggcgcctgtaatcccagcctgggaggctgagccaggagaatcgcttgaacctgggaggcggaggttgcagtgagccgagatcgtgccattgcactccagcctgggcaacgagagcaaaactccgtctcaaaaaaaaaaaaaaaaaaaaaagtggaggtacccaggaggcagcacagagccacccagacaagcgagaatttgttcagaacactggcatcccctgaactcttctaatcctttgagcagtaacaggacctgccattgtggccactgagcggctctggagtacctgcctgcacatccggctgcccggtgcgagctgctactgctgttgtgctggccaggccagggtggggaatggtcggtgcccttcctggcgctcagctagggaagctggaagactgcagggtggagggctgggatgctcttggagccgcatccacacccccaaggatcccttttgtctgggcccgtacgctcacccgaagcctgcagctgccacgtctgaggacctgctgaccagcctgcgggccataccccagtgtttctgatacccaagcccaaggctggggcagagtgtacctcaccagcaagttcccctgtactgccgccagtccctgtgaccccctcctcagttctagatcctcccccttcctctcgcttgggagcagtttcaaagatcctgccttctcctcgcgggacactcccgtgcctgcccccgagtccgtctcttttggctgcatttccaggacagtgcggaacagcttctctgaggtgaccgtcagaaagccaatctctgcgttggggtgcaggccatacagatagggactctcagggggcaggttctcatcgatgtattcgtggtaaccctgaaaaagagggcagtttgtaagcagaggcaaagctgtgcaggctgaaacccatgtcctgttggttaagcattccttgccagaacgttcacccacaccttgctgtctgtacagatcccacttgtttcccagccccctttgtgggctgccccctgtgctcccagcgacataaaggaaaattccattcccccttccctgaggctgcatttctttctttaaaaaaaaaaaaaaaaaaaaaaggttgtttgtattagccttgtgcttcttccaagtgagacgcatttctcatcctctcttattttggctgcctgggttcttgctcaattattgacactccatttgtgctggcaggctctcaccgggaggcacgagccttcattacgttgagctcctgtttaacttgtcatccttaccttgtagtccaggttgggggggatctgaaagccgggggccagcaggacgtctccctccagcatctccgtccggatgtattcagccaggtaggtcctgcacagccgacggtcccagtcatctgtgatgtggccgccatacatgatttcaccaaaaaggtagcggagatcgtcccagggcacctgaggaaggatgacagcgggtaggggaaagtgcccctgtgccccttctctgccatgagagggtcaggctcaggcaggcagggcgtgggaacccagccattggtgctgtgtccttctcgccctccaggtcagcctcctggccatttaccttcagggtcaccaggccccagggccacctttctttccattccgcgccaccagacgccaatgtccggcccctttggcttctctcacaaggggctgtgtggcacctccctccaccttggacagcgcttccacagccggcatgctctgcacctcccgtggggcaggtgtttctgctgtgcctcactgtgcctcagaggccacagggctgaatcggaactcgctccctctgcctctcccactctgtgttaccatctgagactctgcccttcacggtccaatttcaacacaagtggtttgattctgtgtggctcaaggattgactccagtgccgtcaaccttttggccacgaagtcgttagtcatgtcttcagatgcatctggtgagtctcccttccaccctgtggaagtagagtccttcctggttctcatccttccagtagctcccgtgcctccagggtctttgcagtcacatagagggtttgagcaagtgacttatctgacctaggctgcccgggccttagggaacgaagaccaaactcggcagtgtggaccagagcacacgccaggcgaccacacgcttcccaccccgccgccgttcccactcccttcatgcttccttgcagtctcacgtcacacctttgctctggaacattcttcttcctacaaagcctggctcatgggcggcctcgccatgaagccaggcccttgttcttcccgcctccatgtgcccgttttggagcctctttctcctgcacagcgcagttcagcagaaggacggtgggagccacggattgaggccacatgtgtcattttaaattttgtggcagccactttaaaagagatcattccaacatgtaattgggataaaaataagataattgattcttttttggtacccagcatgtgaaatcctgccgctcacagtcagcttcttcctgcttccgcacacctgttctttccctgaagtttgcagctcctgaagggcgaggcagatgttttcataacatcacttccactgtgcgctggccggaagagctgtcatcaaataccagtgggagttcattgaataagaatcagttgatgaatcaatcatctgatttggtctcatgaatttatatacatatgtatatattttttaggttgcttatttttgagatggagtctcgctctgttgcccaggctggagtgcaatggtgcagtctctgctcactgaaacttctgcctcctgggttcaagcaattctcctgcctcagccttctgagtagctgggattacaggtgcacaccaccatagccagctaatattttggatttttagtagagatgagatttcactgtgttggccaggctggtctcgaactcctgacctcaggggatctgcctgcctcagcctcccaaagtgctgggattactggtgtgagccactgtgcccagcccatatgtatatgttttttagacaggatcttgttccatgtcccaggctggagtgcagtggtacaaacatggctcactgcagccttgatctcctgggttcaagcgaccctcccacttcagcctcccaagtagctgggcctacagtcacaccaccatgccagactaatttttttattttttgtagagacagggtcttgctgtgttggccaggctggtcttgaactcctgggctcaagcagtcctcctgcctcggcctcccacagtgctgggattacaggcttgggccactgcactcggcttagtctcatgacttttttactcaaaacgttaatgttttccacattatcattagcgacttacaaccttctctgtctggtcatcacaactgtttgcgggctgcttttcctgcatcttgcttagcagctttggaggcagcgtctgtgtctcccgagaggcaggaagacctgtgcccctctccccctcctggccccacacgctcctcaggagggttgcttcccgcagggggtgggggtgagtgctgtctgcatttcccgtacctgctgagggaaccccccaccccgagactcctgggggagctgtagctctcaggcccctccctgggagtccctgcaggttgctctgtgtttcaaagcaacgttccatcagacttttgtgttccgttcgcatgggaatccctgatctatttcctcagagcccagacggctaaacaggccgtggacacagatgacatcattcccggtggtcactcagcgtgtagcatgacctgtgccatgaagggaatatgggagccggtggggagtctgtggagggggagggaggcctgaggacagagggaaggttggccagcgcaggccacatcaggacacagctcctcaggatgtggcagccgctgatgtacatggtactcgcgcggcttctcagcagcttagaagctgcccagcgtgtgtcaatgggcaacggctaaggaaatgtcttaaaaatcctaacctggccaggtgcggtggctcacgcctgtaatcctagcactttgggaggccgaggtgggcggatgacttgagcccaggagtttgagaccagcttaggcaacatggtaaaaccccgtctttacagaacaaaacaaaacaaaaacaaaaaaaacctggcattgtggccgctgtagtcccagctacttgagaggctggggtgggaggatcacctgagcccaggaggttaaggctgcagtgagctgtgattgtgccactgcactcctgccccagttaacagtgaggccctgtctcaaaaataaataaataaataaataaataaaataaataaaaattaaaaaaaaaattctagccagactgtttctcccaaactagtctctgcgtggtttggccgtctctccgtgctgaaagtccctttgaacatcttgggtgcctctgggagtgttttcagatccgggtcttgttctgggtgaaatgtccggccggcaccctgccccatcgaccggcagacagcagaggctgcctttccccagtggcatctatggcccatggtggcccattgccagggagcacagggagccaagtcccggcccagttctgctccctgctactccagggctggtgtgcctcccagggaactaagcataccaagttccaggcccagccttcgccagcagcgatcctgggaggtcgttgtcctccagtcttggtgaggaggctctgtcacagcctcccaggccaggtgcttgacatcagaggtcacctcctgggggccttctcaggacacccaatgggagcacgtgtgccgtgcatgcctggggcttagtggcccaggtcttgagctttattacaaggagatggaaaaaaggagggggttcctgagactggcattgccaggccaggcttccctcattgaacccccaggccctgaggtggaggcccatgaggaagcaggcttagcggtccagtgacttgctggaggtctcagtgaatgagtagcagagcaggcttcaaacgtgccccccccccccgaccccggtgccagcaccgtttctcaccatgtcacatccaggccctgggagtcctccaaccccgaggccccacgtaggcagcagccctcctgggcagctgagtgcagctttcttcccatccccctcccagtctgtaagagggtgcccggaccttgctctctctgagccagggtccatgtcgctattgatttggaggccgagagtgaggaggaggacccagggtttataggggtgtgcaccgccctctgccttctgggcgaggggctcctgggcctgtgccaggcttagcctgagtcaaagcttcgtaagaaccgtgcgtggtgagcactaccgctctctccagtttatggttggggtggccaagccttaggagaccgtagatggggctgcagggcctagcagggtacgtgctgcttacagagggccccctccagcgaatagcaggtctgggattcatacgctaccatctggtcccaaacctgtgccctctgctgtgcaccttgctctgtgccccgacctgtgcctcctgctgcagaccgtttacggaggatgtgtggctttctactcagtcctctgtggcagtctgcatgcgcctttatgcattctcataatggacacagcactcccttctatccggggaggttttttgtccctcctgctccaaacctgggttctctccagacactgacagagccgtggtgaggcctgcagcccgggaagccctgcttgtcctccccactgagtcccagctcacaccctgtggtggcaggattctgggggaatcctcatccaggtgcaagaggggcaggtggcgtggagtgtgctaacaagcagaagagctgtccaaaagccggctcctgcaggaggtgggggcaaaggactggaccatcttaattacagcaggctggagagatcacagatggtgctgcctttcaagttctctttggtttgtgaaacctacttgatgtcttttaagcctaagacaaagaccaaaaggaaagggagggaaggaaggagggagggaaggagggagggaaggagggagggaaggagggagggaaggagggaaagagggagggatatgtccaagtacagggcacacacagcccctcaccttggggttggcctccaggtagttgtagagcacgttgatggagatggtgaggtccccgttgttgaaggggtacgaccggttccagccctgggcgccgaacttgcgcctctctgccaccacagcgtggaagtagcacagggcgaagagcatgcacttgaactccatctccttggtgcacatctccagggtgtcctgtggggcacacgctccggtcaggtattagggagagggagaagtttacacagaaatgcccctgagggtgaccagcgtccagcccttgccagatgctttgctagggtgggggcggtggggggtacaaagctgtgggctgtgcaggtctctatcagacccgctgcaaggaaagctgggctgtcatggctgagtacgatcttcttgttcctttcagaaatgcaattttatcccttttaagtacttaactacaagttgaattattgatactgcttcctaatatcttcccaaatcctggacatttcgggactactttaatacgaaataatgttcctttgtaattatcaacattcctcatcacttatgcacagtatcccaaactctaaaaacaactggtaaagttccatcaggatgggggatgggatagaggatgggggatgggatagaggatgggggatgggatggggtcgcttctcaaaccctttctttttatctggctccagggaagggaaaactgagcctaaattgtgactcctacgtctctggatttgtgagcttttactcattaacctttgctacgtagtgactcctgaacacacagaggcttctggaagccaagctgtgctccacctgctctactcagcggctgacggagcacctctggggccaggcactctgtgtggggggagggcttcaggcacagtggccgaggatcccgctggggagggacagataagtgccaggggaagtgtactgggtggatcaagagcagggccctgtcctgggcatcatggaaagcctggcacaggcccctctggcaacatggacaagaaggggagcagctggggttccatcactcgagtatcccctcctggctgcctgggacagagacgatgggcccaggagactggcctggccagtccctttcagacctcagctccctggggagggcgctggcagtgaacacgtggagagccagagtgacaccagccaatgggagactcaccagcccccaaggacaagggaaggcctggcgggtgtcaccgtccatccatcctccagagtccatccgatccggtgcttttcaccagcctacccgcactcaggtctggggcatcgtggacatacaggttccacccaccaccgcttcttcctgtgggcccttgttttcagaggcccacagcccctccgaggcaactggtccctgaacttgtgaagggtctccttacccacaggtctcagctgtcactccctggctacccacctccccaaccagagatgggatgaggtgccactcccgtgtgctggctggcagggctccacgctggctggaagtgaaggcccagtccctgcctcagtgccccgatccctgtctgtcgctgactgacactttgcaaaatacaataaaacgaaacaccaaaggaagaactgcccctgtgcttggattcacaagtgtcgggtcgctgcagagtttgttgagtgcctcctggatttctgcgctgatctcatacagactggcagaaaccgttccaggactggtgctgacctcagggctgctgtgagctgcatggccccatagcaccgtgtgtaccccacgcactcatcacactagggtgctgcttccagaacgtatcctcgcgcccctcagcagggtgcaggccaaggcaggaggcgtgtggtattgattgattggttaatagaacgggggacctattttaaacatttgtttttctgctttttcttttactttcacactttgacaagggtgtgtcctttaaaagctggttgggaattgttaatgggtgactctgatatttccatataagtagtttttaaaaatgtatcaggcatggaagccacacattcatggaccgatacaccccataagtagatctttgttaagtgttatagaatgatacagggtgttggccgggcgtggtggctcacgcctgtaatcccagctatttgggaggccgaggtgggtggatcacctgaggtgaggagtttaaggccagcgtggccaacatggtgaaaccccatctctactaaaaatacaaaaaactagccaggagtggtggtgggtgtctgtaatcccagctacttgggagcctgaggcagcagaatcacttgaacccaggaggcagaggtggcagtcagccgaggttgtgcccttgcactccagcctgggcaataagagcgaaactccatctccaaaaaaatagggtgtcaaacctcaaaaaagttctaggctccacttgggagatcaagtttgtgcacacaaaaagttctagacagagaaaatgctgaggtgccaaaaggagaaatatcgacatgaggacctgcagaggcaggagcacccccgaggacaagagtggccaagatttgggagcctgaggcaggtggatcacctgaggtcaggagtttgagaccagcctggccaacatagcgaaatctcatctctaccaaaaatccaaaatattagctgggtgtggtggtgcatgcctgtaatcccagctactcgggagtctgaggcacaagaattgcttgaactcgggaggcagaggttgcagtgagccgagattacaccattgcactccagcctgggtgacagagtgagactccatctccaaacaaacaaacaaacaaacaaacaaacaaacaaacacgtggccaggaaggctgtggagaaggctgcatctgggggaagccttgaggtctgtgagggaagagtcaggtgaggacagaccccaggcagatgcagaagtgggatcccagccaaggagggtcctcgagccccaggtgccaggcaggccctcaccctccgtcctggaggcaaccagcagccactacagctgttagcagaggaggaccgggctccctagctagctgtgttttgccagctgttcctgctgatggtgggtcagaggggggctgaaggcaaggaaacctggtcacagatccagagcctcagcgagtacagcaaccccatctaccctggttgcccatagcctccagcagtggggctctgtactcccaggaaagctgaccagcctccagggagtaccccacggagcttggccccatttccaaggaccagtcatgacgtgttccatgctctttaaacacaatggacagcatctaccagccctcatttgcaggttcatagaactgattaaaaactatgtgtttctgcatctacagctttaagtaataaatagtgccagagcaccttaaattatttgcatttttccgtcttttagaaatacattgattttgactgcgaggggtgtgtggacaggggaagcccagaggggaggtgtccccagagttcagagcggtcctcagtggtcctcggggccccaagggatggatgccaggccgtggcatgggatggggaggcagcccgagcaggcgtggccctacctgggtgaacaggtccagggccttgtgcaagttggcgtgcatgcccgtggggggctcgttggtgatcttgatggcgttctccagaatgccctgggggatgatgtgggtctcggggctgggggcaggctccgcgctgatgaacacccggtagtcctcatggctgcccgtgctgtagtgctccagcttcttgtccagtgttcccagccaccgggccaccaggtggatattctgcagccaagactagaggctggttacacactttgcccagctcctggcccacgaggagagactggcacgtggctatgttccctggtgagggcagggctcttctgccagcaccccacacttgcctggtgctggcactgccccacccctcacctgtccaccctaaccaggtgctgggcatgccaggatgtcttcggcgaagcaactgaggccccagaatctatttttgtgttcaatgaattgcaaacctccagccttacggtgagtcctttgtgtcctccctggcataaggctgagattctgtggtccccacccctcctcttgaagctgagggcttcccaccggggccaggcttagccctgtggattgaggtcgacacacactgtaagacccgtggaagctgggacaggcccagaggcgctcgaggacaagcggtagtgagaaggggtcttggatgggctccagggctgaggaggggtggtcgtgctagcgttgaaccaaatgtgcagagagcatctcctgggcgctctgggctttgctgcctgccccaagtgaggagaaggaggaggaggaggaggagggaggagggaggaggaggaggagatgcttttgtcaacccagcacttgtcatcttttttttttatttttttgagatggagtctcactctgtcgcccgggctggagtgcagtggtgcactcttggctcactgcaacctctgcctccccgggttcaagcgattttcctgcctcagcctcccaagtagttgaggttacaggcatgtgccagcacacttggctaatttttgtatttttagtagagacagggtttcgccatgttggtcaggctggtctcgaactcctgacctcaggtgatccgcctgccttggcctcccaaagtgctgggcctacaggtgtgagccaccgtgcccaaccatctgttgtttaaataatctctgtttggggtactctcgtataaagcccagcttccctctcaccgttgaagaatccacgctttcctctgggcagtcatggcgtgccacaccacccagctgaccccagcagagccgacactggggatgcctcctccttcagtggtgttaggatttccacccacatttctgaatgcaaactccacatcctgcttccttccgggccttctggcccatccccattggccacctcagtgcggggagcccttaccctgcagtgctggccccctcgtacctgcagaatgacccagtgtcctttctctgcagccacgtccagggcgttctcagccaccacctcttgtccctgccccagggacacattatggagttttccattgtctatggtaaaccctagtttttttcctaaagaaaagaaaaacaggaaaaaaacaccacgtaattaaatgacacaggttcaggctctgtgatctacagccaggaattccacatgcctccctcatttagtttcggtggtgaaatacacatgacataaaacttgctgttttaaaacccatcttaaagcgtacagtgcaccgacattcagtatattcacaatgctgtgcaatcatccgtttggttctagaacattgtcatggcccaagaggtggtccccatacccattaggcagtcgctcccaatctcctccaggagccactcgtctacagtctcctttgtgtctccatggatttatccattctggatatttcatatcaagggaactgcacaatatggggcctttgtgtctggcttctgtcactgagcatagtgtttttgaggtccatccacgttgtagcatgtatcagtacttcacttttttttttttttttttttttgagatggagtctcactctgtcgcccaggctggagtgcagtggtgccatctctgctcactgcaacctccacctcccgggttcaagtgattctcctgcctcagcctcctgagtagctgggactacaggcgcccgccaccacacctggctaatgtttgtatttttagtagagatggggtttcatcatgttggctaggctggtctcaaactcctgacctcaggcgatccacctgccttggcctcccaaagtgctgggattatgggtgtgagccactgtggctggcctcacttttttttgagacagggtctcaactctgtcacctagcctgaactccactccccaagctcaagtgatccttctgccttggcctccagagtagctgggaccacaggcatgcaccactatgcccagctaatttataaaattatctgtagagacaagctctccctgtgttgaccaggctgatcttgaactccagggctcaggtgctcctcctgtctcagactcccaaagttctgggactacagctgtgagccactgcacctggccgacttcatgcttttttttttttttttttttttttttttttgagacagggtcttactcggtcgcccaggctggagtgaagtggcttgatcacggctcactacagcttcaaccttttgggctcaagtgatcctcccacctcagcctcacaggtaactgggactacaggcgtacaccaccatacctggctacgttttcttgtatgttttgtagagacggggttttgccatgttgccaaggctggtcttgaactcctgtgatcaagcgatccgcccaccctggcctcccaaagtgctgggatacaggtgtgagctaccgcccccggcctgcttcactcttttttaatcgagggatactattccaccatatagagccaccatattctgtttatccacttatccatttgtcagttaatggacatttgggttgtttctgccttttggctattatgaatgaacgtctgtgtagagtacttgcttgaacacagatttaaatttccagttcttttgggtgtatactcaggcgtggaattgctggctcttgtgccaattctatatgtaacttactgagaaaccaccagactgttttccacagcagcggccccattttacatccgctcagcaacctacaagggtcgcagttctcaggcctcacaactcgtgttattttcctgttcttgatcattgccatcctaccggcgtgaagccgcgtcttgggtgtgaagtggtgtctcatgtgcttttggtgtgcattttcctggtgcctggtgatgctgacaatactccgtctttgagaacatcacttgcctgctacacttacccagggcttccacgtctttcaaggggtcaacccccggggagaggatgaagaagattgacgtggaggggctgctctcctcgtaggacttagaaaactcaacactccggccttccacgaacttgctgcccatcttttcctccacgaagttcctaggggtggagtgcatcagaggcagcggaacctgaggctctgggccagggcggggcgctcggggtgggctgtggcccaggcaggggggccattttttggtggactttcttcagcgggacaaggcctgtggcaggagagcagagtctttaccgggctttcctttctgcgagggattggccttgtttgcctcgggcaccctttctttcccgaggggccccgcactgtgctcctccttggagcagcctaagcaggtgcagggagaggccagccttggaaggcacccagggtcaactgcggggggtgggggcgctgagaaggaaggaagttcagattagagcaaagctttggtgagcctaaaaaagtcaaagaaaaaagcaacttcagatgatataaacacctctctctacaaaagcccccaactctttctaacatgaccccaataagtctggggtcagtcggggtctcggctaatcctcccatggaggaccgagtgatgttctggcggtctttggatcaggtgttggcctttcttctgtgatcacagagggctgagcttactgtaatgtataaagaatgaatcacctgagctaagattagtaaacttgccagtgtggtggctcatgcctgtaatctcagcactttgggaggccaaggagggcagatcacttgaggttaggagtttgagaccagcctgaccaacatgacaaaaccctctctactaaaaatacaaaaagtagccaggtgtggtggcacaggcctgtaattccagccacttaggaggctgaggcaggagaatctctggaacccaggaggcagaggttgcagtgaggtgagatggcgccattgcactccagcctgggcaagagagcgagactccatctcagaaaaaaaaaaattagtaagattttagtggccagctggtctctgaaaggaggacaaatggccgcatcccgaagggtgagaactgctcgtccctgggcaggtgaacgcccgagtgctctgagagtctgggtcgactttcagaaggctctgctcacactcatgccacccagcacacctcacctcctctggttcaaccagcaatcagccggctattgcctgtccatgcccttgggactttctggggacacctggatctgctattcctttccctgcactggcctttgctggcttgtctctggtgtcctgaactggggccagcctcaggcaagggtggggaggagttgctcctcctgaaggcccccaattctttttggaactctggaatggcctcagaccctagatgctgtgatccttgtctaggaaggaacttccagaacatatgaagtcctgcccctaggcaggaatgactctagatcacctttgctaattacttggccaggccaaatggtcatcggctgtggatgaattaatgatgcagaagcatgcaggctgggttcgtcagacctcaccacctctgacatggtggctttgacaaaggagtgctggagccggctggtgacagctttcagcagaccccggcaactagtgcaaccggccacagaggaagcacttacgccatggaaattggcacatgctgtgcgtcagggtttgtgttgcgcacgtgggggtggcctggcctgccctcccagtgcctgtgacctgagtgtggaagtgctcccgcggctgtcagtgcttgcaacagtgcctgacacgagacacccttggccagtgctggctttgttattagtcacgtctgtttcaatctccttgcttttaagcgaccccctccctatacaatcagggcagtaaatctgctttgctccacgtcatagaaatgtgaaacacgtcaatgctgagggatgatctgcgctcatgggtgtttgggatggtccaaggccaccgcagagcacgcaaatgcttccgcagtgggtggctgtttccttcttttaggtggccagagtgcagtcacacaggctaacttaggcgattctcagaagctctcaggagatggggaaggtcacctcacctcatcctctagacgaggaatcggatgcacactgggtcttgtgacccaaacatgctgcacactcccacaggagagggtgatcccgctgcgatggccgagggacctttaccttggcctttcccaaaccctgacccccgcttcctccagctctgaccctgggacacagctggcattctccctggacctcgctgctctcctgcatcacagtgacttctggcttcattccaccccctcctccccaccactcccggtccctgtcctctcctatcggaggaaaacaaggcaaaactaaactcagtcctgggagttaggcctctgctttgtcagaagggaattctttttatttttatttttattttgaggcagggtctcgctctgtcacccaggctggagcgcagtggcacaatctcggcccactgcagcctccacctcccgggctcaaccaattctcccacctcagccttctgagtaactgggactataggagcccgccaccgcgccctgctaatttttagactttttgtagagatggggtctcactatgtttcccaggctggtctcaaactcctgggctcaagtgatcctccccaaagtactgggattacaggtgtgagccactgcacctggccatcagagggtaattctattagggacatgagtgtcctttgggaaacctggctgctttcaggctacttggagaaatgaaaaggggagaagccagacaggccacaggtgctctgaggacagaccccaggctcgtttctgtgctaaacgtcacctccttccttcaacagcccatccttccaacagggaagggtttcaggtctggagaaattgttggtgaaatcagaacagttctcttgcaaactagccatactaatatacctcgattgactttacgttttgccacagaggtactcaaagtcctcgaatgctgatgggtttgccattgttttctccctcaaaacatcttaaaaggaccccatttgtatggcctcagtgcttattcacgtccacacttgacatcttactttcaatgtaggaggctcatgtggggagtcttttcttcctatcatgtatcgcagggcacccctcctcagtcaggttagcgggggacaaggggttcccctaatgatactctgagacattaaggattaacaagaactcaggactggagtccgcagcctggggtggaatcctgcctctgtcctcgaagaactttgtgtgaaatgatttacccctctaagccctgtttcgtttctgtgtaaaatggggagaagaaaaaagttcaggggatcaactcaagtccacagagagtctagcacagccgctcggtcaagcttccatcaggcctgggcctcgggggcggggcccccggcgcggcgggacactcacttgatagcgtaggtcatgcgatctggccgcaggcagcgcaccatgcacagcttctgcagggccgtcttgttcttccactccttggggaagatctccttctcgggggcttccgactccaccagctttttccagcgcttggcagatccttcgatgtcactgtccagatttttgaactcatccatctccgagagggcctaggggcagaggcagcgggccctgtgactcttcccacttacccgggtcccgagagccttcctgtacagttcattcaaggaggagaggccattaccctccgaggaaaccggggctctgggataaggaagcccgagaggctggccaccaaagcaggagctgtccatgcccagctcaggcatcccaggacagcgccgggagcctcctcggcagggtctaacctgcggacatgaggcctgggatgggctaggggctgcttctctaggggtctctgcaaatggggccattctagctcaggggacgaccttcttcaggtctttttgaacagaccttgagactcgagggtccctgactgtgtccaggaatctgaagaacaaacttttcacttgccacttcccttacgctgggaggaggggaggctggggggaggaggggaggctggggggaggaggagaggttgagggagggatggtaagaggccctgaggcctcttctggcccccagaggatatcactctctgcttgctgtgtgcaggtctcagggacctaacacatgtcacattccctataggaacgcagagctatctgtgagctggcagccagcccatcttggtctccatccctatgtgcggggcctccttgctttactgaatttatgggccacagagcctggtattctggccttggaaacatccgcagcatcagctggagggggctccacggcggggagaaagcacaacgtgttcaacgtctaaagacgaaccttgatcccgccccagccttgatgctggaggaagtccactggtgagaccactccggccttaaaagggaaccgcaggaggaaatccagctccactgggttcagctccttcttcatggacaggacctgggggaacatcgaggtgtacacacttaacgcagccagtaaaacgtcagcagccctgaagatgcgcgctggactcgaagaggagttcacactcccggcctgcagggggcgccctgtcctgcccctttggtttggggtaaagttttgtcttcacctcgtctcgctttttaagttgtgaaatacacataccataaaattgaccattttggccgggcacagtgactcacgcctgtaatcccagcactttgggaggccgaggagggggtggatcacttgagctcaggagttcgagaccagcctggccaacatggtgaaaccctgtttctactaaaaatacaaaaaaattagccgggcgtggtggtgcatgcctgtagtcctagctactcgggatgctgaggcaggagaatcacttgaacctgggaggcagaggttacagtaagccgagattacgccactgcgctctagcctgggcaacagagtgagactctgtctcaaaaaaaaaaaaaaaaaaaaaaaaattgacaattgtaaccatattttagtgtgcaattcagtggcatttcacatgattcgcagcatcgtgcaaccatcagcactctctagttccaggacttttttgttaccccctcgcccctgaagcagccactccccatcgccccttgcctctgagagctgctcatctgccttctgcctagggatgcccctgttgtggatgctttgtataaatggaagcacacgacatgccccgtttgcatctggcatctttcacttagcgtgatgcttctgaggttcatccatattgtagatgtgtcagaacctccttcctctgtaaggccgagtaatactccattcttgaatataaccacgctggcattctccattcacctgctgatggacagcgggtcgttttggctgttgtgaattgattagctttgctgattttttaaatttattttattatttattattatttatttttttgagacagagtctcactctgtcacccaggctggagcgcagtagcgcaatctcggctcactgcaacttccacctcctgggttcaagcaatcctcctgcctcagcctcccaagtagctggaattacaggtgtgtgccaccatgcccggctaatttttgcattttttgtagagacagggtttcaccgtgttggccaggctggtcttgaactactggcctcaagtgatctgcccaccttggcctcccaacgtaccaggattacaggtgagagccactgtgcccggccttgttgtctttgagagacagggtgttgctctgttgccccggctggagtgtagtgctgtgatcatggctcactgcagccttgaactcttgggctcaagtgacccgcctatctcagcctcccaagtaactgggactacaggtgtacatcacctcacctagctatttttttgtggagatggggtcttgctatattgactgggctagtctcaaaccgcctcaagtgatcctcttgctttgacctcccaaagtgttgggatactaggcatgagcctcagtgcccggcctcatctggcttttggctgctgcgattaatgctgttgtgaatgctgatgtacaggaatgtggacagatgctggacacctgtttacaggtcttgtgggtgtgtgcccagaagtggaagcctgggtcatattccatgccatcttgtcgcttgtgcatgccggccctctggacctcctgtgggcagggtctgggtcattttgaagtggtgtattgggcagctaacctggcaccctctgtctcagatgggcagcaggtggctgggagcaggggcaatggccactgccatctcctcagtcaagtgcccaaacggtctgtttttcagatcccatagagagtttcttcctgagctggactctttcttttggtcaaacaaaacgttctttgggaccaaagagaatgctttctaccctggaaaattagggggagcactgaggaactcttatcctgatgacctctcagccaggagaaaatctcatagtgaacctatgattcagagattcacatgtaaaaggaaccttcataatatggaccccattggttcaaagtttgagtttgaattgaaagccaggcttacactgatgcccaacctgtttatacaattagtgttgcccagcctgggcaatgtagcaagaccctgtttctttaaaaacattttaaaaaattagggccgggtgcggtggctcatgcctgtaatcccagcactttgggaggccgaggctagtggatcacctaagatcgggagttcgagaccagcctgaccaacatggagaaaccccgtctcaactaaaaatacaaaaattagccaggcatggtggtgcatgcctgtaatcccagctactcggaagactgaggtaggggaactgcttgaacccgggaggtggaggttgtggtgggctgagattgcaccattgcaccccagcccgggcaacaagaggaaaactccgtctaaaaaacaaacaaacaaaaaaaccagaacagaaaaaaaaaaaaattagctaggcacagcagtgtacacttgtattcccagctacagggaggttgaggcagaaggatcacttgagcccaggagttcaagaccggcctgggcaacagagcgagactttgtctctactaaaaaataaataaataaataaaaaattaaaaaactgaagaattagcctagcatggtggcacatgcctgtagtcccagctactgaggcggctgaagtgggaggattgcttgagtccaggaattcaaggctacagtgaactatgattgcaccactgcactctagcctgggtgacagagtgagattgtctcaaaatagcagcagtagcaacaacaacaaaaactagtgtttccaaccatacttatggcacagtgtaaaggaaattgcagaggggctgtactatggtttgaatgtgttccccaaaaagcatatgttggaaactgaatcctcagtgcaacagtgttgggaggtggggtctgagaggcagttgggccgtgacagcagagtgaatggcttaatgtcatgatcaagggagtgggtttgttacacaaggagtttggcccgttttgtgctctctctcgccctctagccttccaccatgggatgacacagcaagaaggcccttgccagatgccagcactttcatatggaacttcccagaccccaggaccatgagaaataaatttctattgtttatagattactcagccttgggtattctgttatagccgcacaaaacaaattaagacaggctgtttaatcaatttcagagaatgcagatctttaaatattttagcagggctgtataaacaggaggaatatttgtttattcatacacttatttcttaagaaacatcagtcaccccacagtgggctaagcactaatgcaggactatttactcagcacaacttacatgtaaaatgaatttccttgtgaaattctccttaaaacaccaccccttcactagctcccattggaatactgtgccagcttcccaaatatcaactaggagagccccaggcctgttccacgtcaggcatctcagactttataatcacctgggtatattgctaaaatgcgggtttgaaatcaccaggtttgggtgggggcccaacaatctgcctttccacaaagctcccaggggtcagtgacaccgctggtccacggaccacactaggaacagtgaggctagacattacctgaaacgtaacttgtgccaggaaaatgagtttgtccctctcgaagagtccccgggccgtgtacatgtagacggagtaggtgatctcgtccgtcaggttgatcacccgctgcttcacctcgttggcaggggtggtcctctggatggctttctcaaacaccacgttgaaggcctggggatccgccaccgagagccatggaggcgtgcagagatggagcccttcaccactccccgccaccactccctgccacctgtggtggcctccagtttgttttgtttctttgagacagagtcttgctctgtcgcccaggctggagtgcagtggcgtgatcttggctcactgcaccctctgcagtgagggaggttgcagtgttcaagcgattctcctgcctcagcctcccaaggcgcacaccaccacacctggctaatttttttttatttttagtacagacagggtttcaccatgttggtcaggctggtcttgaactcctgacctcaggtgatccacccgcctcggccccccatagtgctgagatgacaggcatgagccaccatgccaggccatccagtttgttttgattgggttgtgagtgcctggaggcaccaggggaagagcagggaggagggagcagctcataccctctcctggggagaatgggtgtaggactgatgggggcccctggctccccctcttccagctccatctgcaggctggaccaggtctgccctctgagggtggccctggcactgcccgatggctgtgtgggcaacaggcctggctgtggagcccagatgcagccccaccttgagggaggcacccagccccagctgcagggcgcaccttgagggagaactggtagacggggttgattttgttgagatcgttcagtatgaagtagagcagagatgccctctccgcagccgggcggtagttctctctcgcttcgttgattttaacttctgtgatttttgcctccaccacctcgacacaaacaaaaggggtgtgaatgacacagcagatgggcagtgccatgagcaggtgggctcattcccagccaccagcctcgctccctgggaagccacccaagggctctcagcagcagctgggtgcaggatgggagcccagaccccttctcctgccctgggcccactcgggcacgtatgaccgaagctgcttttctcctttctcatggtagggaggcgccgatcgcccgtggcccagcctcccaagccctggctgccagggcacgtcaccgaggcagctctgaccttctcctcgatctcgctggctgtgtgcttggtggtctccagattctccaccaaggccgtgtctcccagaaagttccccgacgcagccgacagacgggccaggagcgaatcttccagctctttcagaacaatcttaaattcgttttgagacttggtgaggtttgcctgcaaggggaggtgcaggagtcactgcattgcctggctctgtccaccgggcacccgggcctccctcaggtggccatgtagctgagccaaggcccaggctttgagcgggaggaacgagctcaggtcctggaaggggctgcagaagcagagcccctggaacctcagagaggccctggccctgctcccagccttgaggcttcctgtcacggagactgtagggggcagaacggggacaggcgggcctgggcctcctgagcccatgcaagtggctataacagccagaaatgtggcaggtgcaagggctggcagccaggccattcttgcagggcagcgctttggagcttagagcccccgaggaccgctgtgactcatgttctttaagcaaagaggtcatgtgacttagaattaaatttgggagcaggaagaggggacagctggggaaggaaatgagccatcctgtcgtatgagaagctgtgatgccgtgggacacactgaggcaccttcagagagaagcaacgacacacactggactggcagccctggtcggggaccctcacagtgacctggccccctctgtgtgggacggcacctcctcccgtgtgaccaaacttcaggccattaccttcagctgttccagatctgggcgctctttggccaccacagcggccaagagttggtcctcgagtccatccctggtgaccaggaagttgatgagggtgcactgagcctgcatctctggcttgtagtgtgggttgaagtacttggtgtgtaggatcaggcggaacttggggtggtactccacctccttgtcaccgatcttaatgtacctggcggttggtggaggaaagggttagtgggcctcccagtgaccaggggagaggaacacaagtacagaccacctttcaccccagccccaggccaggccgccaccttgaaccctcccttctggtccctggaagagcactgcacctctccttgtctgttcctcctccctggcctgtgacgtgggcccttctgggagatgcacctgctctttccttgggtgatcaggctcatctttgcagcagggtttacacccctctggcgatactctgtcctcccctgggagccctgaccgaaaccttctgcttggcctccacccagactcatttacaacattcgtccattctggaagctcccaggactgcaaccctgggtctgctcatccactgtggggggcgcttctctccggctctacaccctgctgtcccctctttgtagctgggctcactttgaggggcctctggctagcttcacccctcagcactcacaccaggcccctcccagagtctaggacctctgcatattgatttgccacctcctgggttctgggtttctgcatgcatctctgcatttaaaggtggctcctgtcagctctgacatttacatttttaaagtagatttaattttttaaaattgtaaaatgaataatgcaagctccacgcatcagctgatgagtggacaaacacaatgcgcccggccacacgtggaaaatgattctgccatcaagaggaatgaaggactgacacatgcgaccacgtgcatgaccccaaaaaacatgctaagtaaaggccgggcgcggtggctcccgcctgtaatcccagcacttggggaggccgaggcaggtggatcacctgaggtcaggagttcgagatcatcctggccaacatggggaaaccccgtctctactaaaaatacaaaaattagctgggcacgttggtgtgttcctgtaatcccagctacttgggaggctgaggcaggagaatcacttgaacccaggaggcagaggctgcagtgagcagagatcgtaccactggactccagcctggacgacagagcgagactccatctcaaaaaacaaacaaaaaatgctgagtaaaaagagccagacacaaaaagacacatgttgcttgattctcttcagaggaaatgtccagaataggcaaatccacagacacagagagcagagtagtggatgttagggctcaggagggaggggaatgaagaagagtgggtacagggcttcctttcggggtggtgaaaatgtgcaactggacagatgtgtttgtacaacatcgtgagtgtaccaaatgctcaattgtgtattttaatgtggttaattttacgttatgtgaatttttaaaggtaatgcagtcccaagatttgcaaaatgcctaagaacagaatgaagacagacatcaccttcaagcctccccatctggaggccatcactgataaaatgttggcggagatattcctaattgggaagtggcccctctttccagtctttcctcaggagctgggggttccttcccaccagcaggcactttgtcaaagcccttgctgcttaccagggaagcaaaggaaattccgggcgttttctctacatgcacacgcccaggcctcgggcctgaagatgtttacctggctcaagccacggaggcggaaacaactcactttccctttttaatcgtgttcctgcccagtagagggtccagcacggggtccacggtttcgccgatgttctcaatgagcaaggtgtccccttccgagatggcctgctcgatgacatccaggtagctgcgggcacaacacggaagctggttcatggcagagggcctcgtgatggaacggtgcgcacgctccgaccagcagcccctgccctctgagcgagacagcgccaagcgaggggtgacctaggagcccacaacttgttcccaacagctcgccctttcctgaaaggagccgaggggcttctttgtaaactgcccccgtgctcttatgggagtggagatgaaaatggaaacagttttgctttttgagacagggtctcattctctggcccaggctggagtgcagtggcatgagcagggttcactgcaaccttgacctcccaggctcaagtgatcctcccatcgcagcctcctgagtagctgggactacaggctcatgccaccacacccaactaggttttttttgtttgtttgttttttgttttttgttggagagacaaggtctcactatgttgcacaggctgggctcaaactcctgagctcaagcgatcctccttcctcagcctcccagagtgctgagattacaggtacgagccaccacacccgggctggaagcagctttgagtagctttatggccacagagacaaatgttttcatatccacccgccattggattttccagcaccgctaggaagcagggcatcactgtacctgtgtcgttatagccattgtttctcaactgtgatgagaatacagaccacgagacccaggaacatgaccagcctcaaacctcccagccagcaaatggccaagcgggaggcaaccccaggcctgagcctccgtctcactctcctttccctgcaggagcagcaggtgatggggacaggggaagggaaaagagctcctcatttcattctttactactgctgctgttccccaggccagatttaaaacctgtgggctagtacttgtattgaaagacccacccatccattgaaccaatatggaatgcctaaggcgtgcttccaagcagagccgggcttcggcccaggtcctgcgcccgcacacacctcttctgtcccaggcggatggctttcagttcactcctgtatttgtttttgatccacttgattccttggagctgggcgtccacgatcagcggccaccgctcggtgttgcccaggatggtggcattctcggtggacatgcggtcgctggggaggccctggttgttccaggtggccacgtccgcgtcatctgtcagcaggctcaagggatccaggccattcgtgatcgggatggggacctgcccagggaggcacactttcttagagggggtaatgcgaccttattacttactagaaaatagctctccaaataatgctctgtctggtgctgcggttaggggtggaccagcaggacgacctgggagaagccagccatttccatcactctggacagagcagctttgtaactcggccagaaacgatgtcagcacagcaacaccgggccacgttttttttttcccctgacagagtctcactctgtcacccaggctggagtgcagtggtgtgatcttggcccaccgtaacctctgtctctcgagttcaagagattctcctgccttggccttctgggtagttgggattacaggtgcccgccaccatgcccagctaattttcgtagttttagtagagacgaggtttcaccatgttggccaggttggttttgaactcctgacctcaggtgatctgcctgcctcagcctcccaaagtgctgggattacaggcgtgagccaccatgcaatgccactgggccacattctcatccccaaaggggcctgagcctcatcacggaagtcaaggtgccatgtggctggttctgccctgctgggacctccccacatttcccgagtgatgagtaggactccatttttttttttttaagatggggtctcgctgtgtcgtccaggttggaatgcagtagtgtgatctctgctcactgcaacctccgcctccaaggttcaagtgattctcctgcctcagcctccccagtagctgggattaaggcgccccccaccaagcctggctaatttttttttaaatttaatagagatggggtttcaccatgttggccaggctgctcatgaactcctggcctcaagtaatccgcccgcctcggcctcccaaagtgctggcattacaggcgtgagccaccgcgcctggccaggactccactccttacctttaagttatgtatgtaagggatccagaatttctccatcagctcattccggtatttcttggtgaagtagcccacgtaggacacgaaggcagagatgagcaggacgtccccacacagcgtgaccccctggctcctgaagttctccacagactcagcccagcggatgttttccgatgctaatcccccgaccagcctaaagtgggatgagagagaataaaacatatttgcacaagtgaggggactggaccagacaagcctccacctctgcacctctgtgaatcttcagagtttcccgtctgcacctggctcagtggctcaatgatgaaaatgcttttgggaggaaatgctttagagaagcccgaatcatgctttgtggccgggcgtggtggtcatgcctgcaatcccagcactttgggaggctgaggcgggtggatcacttgaggtcagggggtcgataccagcctggccaatatggtgaaaccccgtctctactaaaaatacaaaaattagccaggcgtggtggcccatgcctgtaatcccagctattcaagaagccgaggcgggagaattgcttgaacccgggaggcggaggttgcagggagccgagattgggccactgcattccagcctgggtaacagagcaagacttcatctcaaaacaaaaacaaaaacaaaaaataaaacaaacaaaaaactccttggcagcccttaggaatgctgtgtttcctcttcccaagtcacccgcattgacacccaagttgcccacattgacacccggctatggctgatgccatttgattgcctctctcctgtgctgaagatgctgccagataccacagagcactgtctcgaccagctggtgacagagcccgggtgaggaccacggtggccacagaacaatgtggcatccagaaggcacctggccctgcatggaatggggactccacgatgcgcctcgtgcttctcgggccaccatcttgaggactggtccctaaccctcagaggcacaccacgggtctgaaagtgttggcatgtttgttgcaagtccaggttgcctgttagagccactgagggtctgtctgtggcaccatctgagcagcccttacttcccagtgacctagagaccatttcgatttggcaggtgaggttaaatccctcatacccggggcaccaccctgaagaccagcctcatgcagcctggggcactcacagctgacaactggcccatcagtggcagccacccacttgggaggagaaaacacagcttgcaggcctggaacagactcagccccaggctctgctgaggctccgggtgctcccctgtgagaacaggaaaggcacactcccctgttgttcagcaggcagctgccagccctggggctcccaaacactgggaccacggcaggtctgctctgagatgtgctctgtgttaaaaggcatgaaggggccgggcgtggtggctcacgcctgtaatcccagcactttgggaggccgaggcaggtggatcacctgaggtcaggagttcgagaccaccccggccaacatggtgaaaccctgtctctactaaaaatacaaaaattagccgggtgtggtggcacgcatctgtggtcccatctacttgggagactgaggcagaagaactacttgaacccgggagatggaggttgcagtgagccaagatcgtgccactgtactgcagcctgggtgacggagtgagactcccctgtctccaaaacaaaacaaaacaaaacaaaaaaacaaaaaaagacatgcagggtgtcagggctcaggatgaaaacaagcacaggaaatacctcattgataatttttatattagttacgtgttgaaataatattttggatatttggggttaaataaaattataactgtttctttgtacttaaaaaatttttttgtagagatggggtgtcactatgttgctcaggctggtttcaaactcccacctcagccctccaagtgctgggactacaggtgcgcacagccgtgcctggctttttttttttttttttttttttagacagttttactcttgtcacccaggctggagtacaatggcgcgatctcggctcactgcaacctccgcctcctgggttcaggtgattctcctccctcagcctcccaaatagctgggataacaggcgactgccaccacacccagctaatttttgtatttttagtagagacagggttttaccatgttggccaggctgctctcgaacccctgttctcaggtgatccacccaccttggcctcccaaagtgctgggattacaggcgtgagccactgcgcccagctagtctggctaatttttgtatttttagtaagatggggtttcgtcatattggccaggctggtctcgaactcctgacctccagtgatccgcctgcctcggcctcccaaactgctgggattacaggcgtgagccactgtgcccagccagcctctgtactttttaaatgtggctgctggaaaagttaaggtgacacatccacatctggcacctggcattatatccctagtggacgacgctactctggagccccaaaccatgatgtaatccgtgaaatgactgtccactggctgcgaaaggatcctggaagccacgtggtggctgaaagtgggttatgaccgagtaatgccccggatcaagccccgtgggacccagtgtcccaggccagtgtgggttacttggaaccacgcgacagggcatattttgtggaggccactgactatgcaagaggccaagttttatcctaattactttgagctcaagaagtgaaagtggcaacctggctgcttccacctgggctccctcctcttcctcccaaggcagttgtgtgggcttgtccctttcagggggtctgagagcaggagggtggtctcggggaggagctgatacctgttcgccagtaagatcaccctgttcgtggcatcggcctcttgctgacacttgattttctcagctgttgctttttcaaacgctgaggttaggttgctcaggttggcgttaagttcctgcaaaaccaagttggaaagctgctggaaaaccccacgaggcatctctagccccctgcagcggcagcagggctgggccctgtgagcgctgagcgtggaagaggctcccacaaaggctgagagccctctggagcatggaggctaaggacaccaagcggctcccggcaccatctggcccctgcctctgcctgcatcctcttgcactgctgaataattcatgacggcgggccgtgccaacccattttcaacagaggtattgactggcagcgcgagcaagcggctctggtgtttcgcagggacgggagcgagccggcacttacggcaatcttgtttttgatccgggacagcttctcttgtgcctctgccagctctgcattagcctcctccagtgcctgcctcttgggcgccacgtcgcagtagacctcgtagaagcggacgatgttgatgcaccaggagcacaggccggcggcggccgtggacttggagcggatgaactcggggtcgaacgtcgggttgccttggtagggcctagcgagggaaccagagggccggagtcgtcaccctgtcctgctctggcaaaacgggcccagagaagctgagtgtcttgcccagggtggcacagctctggaggggcagcgctgggattcacacagtcaggctggccctagaggccaccccccaccggctctgctctcccactcccattaccccacagtggcattgcccagttttccaagtcgggcaccaggagactgaaactataaggttagagggatgagatgcagacgagatgacgtggcaggtgttacattttggggacggtattcgtgtgtgcaatgcatgtgctcgtgtggtcagctgctctcacaggtgctgctgacctctgtggggcctggctggcctctctctcagacctgtagcctgaaggttcccgctgctgagcttgtcagctgtgttcttggggtgctgtatggggaaggggctgcctagattttgagccacaggccccaagagcctgaggccatgcttcacctcagcatcgtgccttggcctgatggagaatcggagggaagccccggctacgaggcccagccccgactcacttgaaggccttcaggcaggcctcagggatgtgctccttgtcgaacttcttcagggagtctaggaaggtgtccaccttgcccatcatgatcttggccgccttccagctcttgtccttggggatcttgcccccaggtgcggtcagaatcatgacggcggcggtgacgttgaccacagcatccggcggggacccaaaggacttcagctctgtcaggttgttctgcaaatgacagacgggatgggtccgatgggagtttggaccgggtcctcggtgatgccccgaagaagccgccatgagtgtgtcaccacccacgccaacagcgaaggcagcttcctctccaaccaggccaggggtcccctttctttccctccccctttaccttattcagagtgtccagagcctcctgggctgccagcagggccggttctgctttggccaggtctgtttcacaggccttttgcttctcagtgacgttctggaaggaagatggacaggagaggttactgcaggcctgtccatgtgcctgtgggggcgtgtacgtgcatgtgtgtgcatgtgtgtgcatgtgtgtgcatgtatgcacgtgcatgagtgtatgtgtgcatatatgtgcatgagtgtatgtgtgtgcatgtatgtgtatgtgcatccatgtgcatatgtgcatgtgtaggcagcagtggtgaggggcggcccaggccccagcaggtctgagctccataagagaggctgcccctccggccaccactcatttgctgtatttgctgaatgtgctcctttgccgacatccctgtgtgtgtgcttggcccctgtctggagcccaccttcctccctgacgcctctactctgccccacaacgctcaggtcagaatgagcaatgcctcgacagttgggtgggattctggaatgggaactgttccttctatcggcttgagcttccaagactggaggggaaatccgggggccactgagaccgccttgactttgcagtcttattgtttctggggctgtttcataatccatccaaaatggaacgtctcagagtgtatagctcacacccctctaagaaagtagcacctccttcattcatgtacatactcattcattcactcaggagacagtgggccatgactggaacgctcttcaataattacacagatgtaggactgatgacaaaaaaagcacccagggaggggtcatgagaagctgctccaatgatgctgtaaccttcaggctccaaagatgatgaagacgctcccgctaagccgtggttctcaacctcagccacccccaaccagcaaggagcccacccccaggccagtaacgtcctaccctctcggggggggcccggagccgcacgtctgaggaccaggctccagtgaggtcttctcaacccctcccatgctcacggatcgcgggcatttcgttaccatgcaggccccattgagcagagctgagctggagcccgagagcctgcatttctcacaagcttctggtgaggctgccgctgtaggctgggggctgaacatggaggagctcggccacgggatgggagttttctaaggaaagcctgcttctgagcgggggccctcccctgggagagactccttcgggggtcccactggtttaggaaccttgtccttctatgtaagtctcagcctttcccacgcctgtcggtggcacctgaccacacgtggaagcccaggaggcctggccagtgcagcagccttcctgaaggcacgctgggctgccttcacctaccttattgatgacctcgaccttgacttcttcctggtcagcaatggccttctctttgctgaccttctcggcctcgatgccgaccacctggatcagttggtctgcgctctcattcttctgcttgagctcagcctcctgaatcgccaacttggctttcaaatcatccacctggggaaggagaaaccgagaaacagcaagtgtgggccgcagccgacacacgccgccctgcactgggcagacgagggctgggagccacagaggggcagaacggcagggccgtgtcttacgactcccagtgactcgttttggagagtcttttcaatatcttaaaagtaagttataaaccctgactgcgtacacagggtcacaagtatgagacattcctggtgctcaaaggagttggcaaggtgactgaatagaaacatatcaactgcagcctgggcaaccgagtgagaccctgtctgtataaataataaaaaaaattagcaaggcatggtggcctgtgcccatggtcccagctacctgggaggctgaggtgggaggatcacttgagcccaggaagtccaggctgcagtgagccacgatcgcaccactgcatcccagcttggatgacagagcgagactctgtctcaaatgccaagtgagttgcagtgccgagcagggctggccagggcccctccaggctggtgggagagtgacagcgagagtttggtaggggggtgggggggtgggggcaggggtgcgaaagctcccctggaagcaagtgggaggtcccagtctgttcacaactccagcagggaggtggcagctattttcaggccccctcacagggtgtcaatggtgggcaataaagatgaaggagccgggactgcacgatggaggaggtctgaagcaggcagaacccttcaagatccatacggtgtggaggaaaggatccagggaggtttttgagccaggccccatggtatgaatggtatttacgaatgaacaaatgcatttgtattgactgcattgggcatgatgatcaaatctcacccgacatggggcaggtgccatcccctgtgtaatgcgccctccatacaatcaacattgtgaaagcattttgagtctgttttttgttacgacaagtatactaactctggcctaggagtaaatgcttctcaaaggcaggaagcgtgctcatcttactttaggcagtgctgagccccagtgtgaccagcccgtggatgcctgtgacagtagcagctcctgcgaggcctccagggaacggcacaggagctggcagccagcccccctctcctacctgggaagccgtgctctgcagcttcatcaggccgttctccagcctctcgattttggcaacaagttccgttctcttcttggccagcaggttctggtacagtttgatctgctccagaaaggttttgggtgtggtgtagttgtagcgcctctcagtagccaggtataccctggacatctcgttgacggtggtgtgcacgtaggacatgaagaagctgatggaggccttgacttcccactacaaagatgagacagccagtcatccctgggaccccatcctgcaaatcagcaaagtggggctccccagactcaccaggggccctggacaaggtgccctgagaccgctctcaacctcagtgtcttcaactgcccaaaggggctcctgagagcaacagatcctggggcccttgtgagcactgcaccatggaagggtttagctcagcgcacaggacacagcagagcttattatcattatctctgacacacagacgcatacatgcacacacatgcatacacacacacgtatatgtgcacattcacatacctgcatatatacgcgtgcacacgcattcacatacctgcatatatacacgtgcatacgcattcacatacctgtatatatacacgtgcatacgcattcacatacctgtatatatacacgtgcatatgcattcacatacctgcatatgtacacgtgcacatgcattcacatacctgcacatatacacatgcacacacattcacatacctgcctatatgcacgtgcatgtgcattcacatacctgcatacctgaaaaagtacaaggctgagaatgtgttttcatatcccaggtaattctgcaaatatttattgttcattaccaaggctgggtcctgggatttagaacttctttccccagccctctgggcctgcccacctacctgaacgcaggcactgggagctttgccccagaaattgtctcagcaatgttaattttaattcaggacattttgaaaagtaatgaattcatccaacacagacatttcagggtatatatatatagtgctggtggtggggccaatgcctgtttctaggaagtctctgccttgggaactagaaacccaaatctatgctccaagggacacctttgaactgcagagttcctgggagtggccagtctcataaatgaatgctctaatggcaagtaggctctttttcccatctttaaaaactaggaaaaagagaagctagtttcaggtttattctgtcctacttaataactggatatgtgttcaaaagaaacaagagatggtaataaagggaggtttattccaagggctgctcatcccccctactgagttggtcaaaagtgagccagggtttatgggtaatttccaggcaagcattgagctcaaacagtgaacatgggcgccatctttcactgttttttgtttttttgagatggagtcttgctctattgcccaggctagagtgcagtggcacaatcttggcttactgaaacttccgcctcccgggttcaagtgattctcctgccttagcctctggagtagctaggattacaggcatgcaccaccacacccggctaattttttatatttttggtagagatggggtttcaccatgttggccaggctgatctcgaactcctgacctcaagtgatctgcccgctttggccccccaaagtgctgggattataggcgtgagccactgcccccagccctcggcaccatctttcaatgaaaagagactgcaagagaatgtcggacccgtctttcctctgaggtgcacaaggcaatggtgtgtgcccttgtgtatacttattccagcaaatacaggctttccagccaagtgctcgaggcaaggcagaaagcctgagtcgcccgatctgtccgcacgctgcatgtcctcagccttcctgaactggccctggagccttggctgcgccggggctgattggaaaccacccctccctggcacaggattgcaggacaatgaaacaaaaaaacccaacagcccaccttggtttacaattctgatgatttgttcatcatgaattttttagcgctaatttgattttcaaaaatattacattaaaacctcacttatcgctctccctctccctctccccacggtctccctctcatgctgagccgaggctggactgtgctgctgccatctcggctcgctgcagcctccctgcctgattctcctgactcagcctgcccagtgcctgcgattgcaggctcgcgccgccacgcctgactggttttggtggagacggggtttcgctgtgttgcccaggccagtctccagcccctaaccgcaagtgatccgccagcctcggcctcccgaggtgccgggattgcagacggagtctcattcactcagtgctcaatggtgcccaggctggagtgcagtggcgtgatctcggctcgctacaacctccacctcccagctgcctgccttggcctcccaaggtgccgagattgcagcctctgcccggccgccaccccgtctgggaagtgaggagcgtctctgcctggccgcccatcatctgggatgtgaggagcccctctgcctggctgcccagtctggaaagtgaggagcgtctccgcccggctgccatcccacctaggaagtgaggaacacctcttcccggccgccatcacatctaggaagtgaggagcgtctctgcccggccgcccatcgtctgagatgtggggagcgcctctgccccgccgccccatctgggatgtgaggagcgcctctgcccggccgagaccccgtctgggaggtgaggagcgtctctgcctggccgccccgtctgagaagtgaggagaccctctgcccggcaaccgccccgtctgagaagtgaggagcctctccgcccggcagccaccccgtccgggagggaggtgggggcggtcagcccccgccaggccagccgccccgtccaggagggaggtggggggtcagccccccgcccggccagccgccccgtccgggaggtgaggggcgcctctgcccagccgcccctactgggaagtgaggagcccctctgcccggccaccaccccgtctgggaggtgtgcccagcagctcattgagagcgggccaggatgacagtggcggctttgtggaatggagaggcgggaggggtggggaagggattgagaaatcggatggttgccgtgtctgtgtagaaagaagtagacatgggagacttttcattttgttctgtactaagaaaacttcttctgccttgggatcctgttgatctgtgaccttacccccagccctgtgctctctgaaacatgtgctgtgtccactcagggttgaatggattaagggcggtgcaagatgtgctttgttaaacagatgcttgaaggcagcatgctcgttaagagtcatcaccactccctaatctcaagtacccagggacacaaacactgccgaaggccggaaggcctcagggtcctctgcctaggaaaaccagagacctttgttcacttgtttatctgctgaccttccctccactattgtcctatgaccctgccaagtccccctctgtgagaaacacccaagaattatcaataaaaaataaataaattaaaaaaaaataaaaaataaaaaataaaacctcacttatcttgatgcctgagtttctggcagcctcttaaacgttgagcccaaggcggacgcctcacttggctcaccctaatcccagcgcccttttctcccagggagccagcccttgggcctgtccttgtcctctgggctctacactcaggcagaggtggcctcagtgactcaccggaatcccctcagtctcctccaggaagcgggcgctgacggacaccagcgcatcttccggccactcgtggaaccagtcgatggccgtgcagttgaccacagctgggaactttctggctcgtacccgcagcacggagcccacaggggagaaacacaggatcacctgggtgtgggagacacagatgcgctgcctactgggactgcagtgctggggcctaatccatcactctgcagaaagctctgccagaaagcaacgcgccctgccgggctcagccgcccagggcctgggcagcacagtcctggttctgggtttgaagggcggccgctgcattgccgtggataaatgctcatctggcttcatgcctctcgctagcagtcccaatccctctggaaggggcccttgcctctctaaaaaaggccgggcaaaggaaggaatggggagtgggcatccacattgggcagatgaggccccagaacgggccgggctcccaagcccttcggttcagcaggaagggtccccgctgggccctgagggatagtggctaattcccagaaagggcagggagtccctgggatcccagctggagaaggtgctgtggagacaggcctggggggctctctggctagataaggacctcccttgtaatgggtctcagcctcccagctgctcttgctctctagtcccctttcgtggcataggtgttgcacggacgctgccattgaatggggtggctcactgcttagctgactttgcacccctcactgcgtgatgacgtgagggtgcaggacagagccggcactggcagggcaccaaagaggatccaggagcaggcagcacctatcaggggatgcctttggctcacagataacattcactaattgggctatgcagcccgcagaggggagggaggaccctgctctgtttgagtcaagcaggggaaaacgatggccggcaggtgtccaggagagctatgggattggcaccccgcaaagggcagcaccactgaactctggagaggacggggccaataggtccaaggggttctctgtcctactaggggagtttagcctgcttaccctagaggtgatgtcgaaaatcaaggtgtggccaggcagcactttgggaggccgaggcaggtgtatcacctgaggtcaggagttcaagaccagcctggccaccatggtgaaatgctgtctctactaaaaataaaaaatttagccaggtgtggtggtgggcacctgtaatcccagctactcaggaagctgaggctggagaatcattttaacccaggaggcagaggttgcagtgagctaagatcacgccattgcactccagcctgggcgacaagtgaaactccatctcaaaaaaaaaaaaaaaaagagagagagagagagtatcaaggtgcatttatctacttaaactagctgtgtgtggggagggggtccacatagagtcggttgtctgtccacatctgtggatttaaccaaccatggactgaaaattgttaaaaaaaaataataaaaaataatacaaataaaaatatagtataacaactatttacatagcattctacattatattaggtattataagtaatctagagatgatttaaagtagaggggagcatcttcaaaaatacgacactgttttatatcgggcccttgagcatccatccctccgtggattctggtatccatggcggtcctggaatccaacctcctcagataccaaaggacgactgtaaaacatttcttttggccccaagatacctctaacgacccacgtgaaaaagtctccaggctccggttcatcagacagccccacccctcacactctcctaacaggatttcacatcccatgaaggatcagtcctcctgctctatgcagagcaaaaacccataccctgtaggccacgggcaccaagctgggctcttgaggccctgccgaagacgggagccccaccttgagctgtctgcgcactttttcgatgaagaacttccaacatgtttcccgagtgtcattcatgccaagggacttgacttggggtcgcatggaggagatgatgttctccacctcgtcctccataaacagcccagggatctctcctgaggccagcaggtcattgatcagcaccagaaactgctcctcggccacctgggagtctgtcatcaggaacaccgagggaacgttcttcacggcagcctttatgtactgagcagcgaggtcaatctggacggagtgaggacacgcttaggggccttggtaaaaagatgctcaattagagacatcctccacaaccaaccagagcacagggccattttttctttgagacggagtctcgctctgtcgcccaggctggagtgcaatggcacaatctcggctcactgcaacctccgtctcctgggttcaagcaattctcttgcctcagcctcccaagtaactgggattacaggcacacgccgccatggggccaactttcttttttctgtctttttctttttttttgagactgagtctcgctctgtcacccaggctggagtgcagtgatgcaatctcggctcactgcaagctccacctcccaggttcacgccattctcctgcctcagcctcccgagtagctgggactacaggcacccgccaccacgcctggctaattttttgtattttaagtagagacagggtttcactatgttagccaggagggcctcgatctcttgaccttgtgatccacccgcctcggcctcccaaagtgctgggattacaggtgtgagccactgtgcccggcccacagggacaactttctaagaaacacaggccaggtgcggtggctcatgcttataattctagggctttgggaggccaaggtgggaggatcaattgaggccaggagctcaagaccagcctgagcaacatagcaagaccttgtctctaaggaaaagaataaaagaagggtgcaggagacccaaaaccttgaacagagcacagccaggttcacagcagccatcaggacaacccaagtgtccatccatgcatgaacaggtacataaaacgtggtccatctgtgcaatggaatatgatttggtcttaaaaaggggaggaaattctgacacgtgctatagcacggacagaccttcaggacatgacgctgagtaaaataagccagacacgaaaggacaaataccgtgtgattccacttacatgaggtccctaaagtagtcaaagtcagggacagaaagaagaatggaggttgccaggggcggggctgggggaatggggagttgtttaatggagacagagcttctgtttgggaagatgaaagggtcctggagagggacagtggtgatggtcacacaacagtgtgaatgtgcttcatgccaccgaactagatgttaaaagtggtgaaaatgtcttactcttttttttttttttttttttttgagacagtctctcactctgttgcccaggctggagtgcagtgtcgcgatcttggctcacttcaacctccgcctcccgggttcaaggagttctcctgcctcagcctcctgagagattacaggcatgtgccaccatgctcagctaatttttgtatttttggtagagacagggttttaccatgttggccaggctggtcttgaactccggacctcaagtgatctgcccacctcggcctcccaaagtgctgggataacaggcatgagccaccgtgcccagccgaaaatgtctatttgtcttagaaaaaaaaattaaaaaacaggccgggcacggtggctcacacctgtaatcccagcactttgggaggccgaggagggtggatcacctgaggttaggagttggagaccacctggccaacatggtgaaaccccatctctacaaaaaatacaacaattagccaggcgtggtggcacgcacctgtaatcccaggtacttgggaagctgaggcaggagaattgcttgaacccaggaggtggaggttgcagtgagccgatattgtgccattgcactccagtctgggcaacagagtgagactccgtctcaaagaaaagaaataagtaacagtgaaaatggtcaattttatactatgtatattttaccacatatgcaaaaggaaagaaaaaaatcttaaatggagaccctaaaagaggccctgaataaatatactgcaggcttggactgggagccttaacaggcaaccccctttcagagtcatccacagcaggatttaaggacagggcgagaagatggtttcataggaattttgcaagaataaatgaaaagttttttttaaagcattttacagagcagtaggaatagctcgttatttttgaatatgccatttccatgtatatatatgttcagaaatgcctgccagtttcatccaagtagtgatgtgtatttccagcgttttggcgatttgcttatctataatatttaatttaaaaaacaagacctatgggcttctgtacttattgaagaggctttaaaagtgtccatataggcaccccagtggctgctccatccttcggaagcaagtccgactccctgaaatctctctgttcagagaaacctcaccaggcctcctctttgggagctgactggggtcagaagccagcctcaaatctcctatctcttgacaagctaagaaaaagcaaggggaagctctgagcctggaaaagcaggtgggcagcaggtgggccgcaggtgggacttgagccaaggctatgtccttggaccctgcctcgaggtaaggagcgtagtgtgagagccagcaatgaccttgagtcaaagacgaatcactcttctcatttcacagtgtagcaaggacattgggtggagactgaccataccagaaatcttttccttttttgttcctttttctgactttacttttttagagatagggcctcactctgtcgcccaggctggagagcagtggcatgatcatagcttattgcagcctcgacctcctgggctcaagggatcctccttgccttggcctctcaaagtgctaggattacaggcttgagccaccgctcccggcccgtctggctttcacagccacactgtcccatatggagtggcccttaccctgcccactgtgaccgctgggctgtccccacctcaccttccccgctcactctctggcacagtcccctccactcccgtcctcttatgctgctgaggctggcccccacatctctacccgcatcctatccctgcacttcccagccccatgtgtcccgctgtgcgatggccgcctcatccccaggtatctcatctcctccgggcctggccccagggcagttctcccccaccctccctcctatcttggttgagagccccatggtgctactgaagctggatctgcctgcgtccctatcatcactgtcagccaaggacggcaatcgtcacctgtatctaggcccgtctagggaccagccattaataaggggcacaggcttccctttctttggccaaaacatcagcagcagtgcctttccttgccatagccaatgccactggcagtagacaggcaggacacggagccgagatttgggagtgggggtgtgtgagacattagggttatggagtaggggtgcgagggttagggttagggagtaggggtgcgagggttagggttagggagtgggggtgcgagggttagggttagggaatgggggtgcgaggattagggttaggatttgggagtggcgggtgcgagacacgcagcaaggcctcctccctgagaataacatgaggccaagcccccaccccacccgatggctgcttctcaccccttccctctcatttgcaggaagctggcggggaggcggggacctgagccgctgagaccacggcccctcattctgctgacaggctttcttcatggggcagcccagctctggctgctgactcaggctggggtgaaggtttcacagaaataaaaactccccaccgcctggccccgggggctgtgtgtggggtgtggggaggggagctggggtagcacctgaaggtttcggatcctggaccccagccgagtccccgaggtcacgcacgctgtctcggcaggcacagccctcgctggccctggtttcccctccccctccgttctcccttctcgtcgcacctgcccactttcagcctttgtggggtcacagagcttgtgccccagctccacccaggtcacccttcagcagtttctgtgctttcaaactatccttcctgtgtcctagaacactaccacatcctgcccgctctatcccctgatcagacatcttgatgtagtctcgttttcttgggaccaagcccagggcttttcacacggcacactgtcctccagggtccaccctccacccctttcctgtgcacccctagcctccagcaggtgccacagcttccgggacctactttataatattacataatcacaaacatatatgttacccccataggggtgagcctattactatggcagcaccattagaacgataatcatgtcgaatggctcaggagtctagctcccccaatacaattcaggaacttatagccctgtttacctctgcccttagttctgaatccacagaagcggcttaagaaatgacagtgatggccgggcgcagtggctcacgcctgtaatcccagcactctgggaggctgaggcgggcagatcacgaggtcaggagattgagaccatccaggctaacacggtgaaaccccgtctctactaaaaatacaaaaaattagacgggcgtggtggcgggcgcgtgtagtcccagctactcaggaggctgaggcaggagaatggtgtgaacccgggaagcggagcttgcagtgagctgagatcgcgccactgcactccagcctgggcgacagagtgagactctgtctcaaaaaaaaaaaaaaaaaaaaaagaaatgacagtgatagcaaagctgatttgtgatgggtgcagggacagtgaaattccacagcccagatcacagagccacagcagctgatgaataaaatagtaccgctgaggctgaggctgaggctgagcacccacaatcagccccaacaggaaggatcagggagaaaatccccgcagggacgcagagcaaggaaacgatgccgtcatgaacgtaaaccaacgtgatttagttaatagactagagacttcaatggagaaagctcagtaaaaccatacggctccaggttcaaatgacacttgagtggccgcagataccaatgtgaactaactccatcagatgcgctgagaacccatgacacactaccgctcatgggtccagaggacagggctgtgttcaggagtgcccatctgaggagttcaaaaaagagcaggccggcccctttatacatggagtagaatctgctgggaaggcagagaacagccagccagaaactggaggctctcccagaggttggccgtccctggcacagcctgcactgcccctccagggtctctgcctgcagacacctcccactgctcccagcatcactggctccaggtctgcctgctaaagccaccagcccagcgactgtctgagggccacgtactgcgggagggtccccttaggttcccccttgggtctggcatcgtcctggccccacaacagcggccccagcacacagagaaggcatggccgtgtaggacggcccaatcgatttcaggtctaatctcaagcacgatgattccttctgaactaatggcacgcagttgcctgggagagcagattttcaggaacaagaaatcaataaaaaccctcagcagtgtgtgttgggcatgggagaccttatgtttagtctaatgtttatttcattcattccaaaagcagccattcagcatctcaggcatgcagttagacacccagtcatggctctgaattctgtagtctggagagaataggtaacaatttggaacactcagtgaccaagggcagggatccaacctctctgcctctgtgatctgggttgattctgtggacttgtgtccatcgagtagttgacagacacactcttcacctcagtcacacggacacgcacactggctggaaggtttcacacccttcacctcagtcacactggccagatttcacaccctttacctcagtcacgcgggctggagggtttcacactcttcacctcagtcacccgggcacacacactggccggaaggtttcactctcttcacctcagtcatgcgggccggaagatttcacacccttcacctcagtcacatgggccgggaggtttcacacgcttcacctcagtcacacgggccgaaaggtttcagacccttcacctcagtcacatgggctggaaggtttcacacgcttcacctcagtcacatggacatgcacactggctggaaggtttcagacccttcacctcagtcacacgggctggaaggtttcacactcttcacctcagtcacacgggcacgcacgctggctggaaggttttctggcctctgctttctaagataaagaccctttggataaggactattggtgatgctcggattccctgtactcgctggcttcattttggaaaagggagtgaagtttttctttactccctgaccctaccctgaaaggcagcctattgaacagtaagctctcaccttgaggtcggggatcccgtagcccttcttgagggtgatctgaaacacgtcaagcccgctgatgtacgctgccaggcgggagaggctctgtttgccactgccgcccacccccaccagcagggcattcccccggggagactccaggatgcgattaatcctgcagatgtgagccacggcgtcctcaaacagcacctgcagaaaccggagagatcccacaacatcttgtagcacctggaatcacctctgtcaccagcacggactctgcacatgctgaggtgtgcactgtgtgccacgcagccccacacaatgccactcggatgtcgataatgcaaccggagagggtgacccggtccaggtcccgtgcccttgctatcagctccagcctgctcaccaaattcatgactgcattaacttcattgtagctgtccaggacgtccacgaggagcttgttcagaggagccatgtcggttacaggaacatatttgggatcgccaatcccttgagcaaagtggcagaagatatttggcttggcaaataagagttcatcaccaagatcctagaaaaagaaaaaaaaagacgatacttccggtttttgccaccatgaccacacagatagttaacagcaattcagtactttgccaaggtggcctaggaggtcaccacggggtcccaggccaagtctccaggggcccaaacctgctgccgtgggcccagcaaaccactggggcaaaatttcctagagtgggagggtctgatccccactgtatcagaaatgaattcatagtccaaagaaatgattccaccaagaacacacgggacacaccagcgaggcacacagagccaagcagggcctttctccaccccaagtggacagagggaggtgatcacaccctgatctactgagcactcaattcctcctcactcagacccacagccacgtgccggagttatcgcgtggaaccctcggacccacagccacgtgccagagttatcgcgtggaaccctcggacccacagccaagtgccggaattatcacgtggaaccctcggacccacagccacgtgccggagttatcgcgtggaaccctcggacccacagccacgtgccggagttatcgcgtggaaccctcggatccacagccacttgctggaatgatcgcgtggaacctaacacggatcttcccacccccaacaaagggcccttctgagagggctgcagttctcattggccgccgacactccaccctcctggagccattctgggctcggcagagggactgggcagcttgacttacatcaaagaacttcttggtggaggccatggtgactctatgcaatgtttcctggtctttttcgtcaaccattttgtcaccatacactcgttcagtctcatgtagccaaaggcggacgaggtccagtggggttttcagaacttctgctgtggaaaataagagtccctgccccaaacacaggatgatcagcaccgtcagctgttacgaaggcgagcccagagctggacacagatgaccctgaggagcagccccctcccccggggcgaggggacctgttcagctgttggcacagcattcacttggggccagggaagccactcatcacggaggtcccaaaaatcccggatgccagtgtgtgtgtgtgtcctgagagatgtggagttttcctcataggacagggttggggcctcatcctccagaagagtgaatggtggaggagggacaagggaggctaattgcaaaggaaagcaggtgaccgatgccatagggcaggtcacaagcttgggtaccacagcaagcctatctggtccagtcctggcttggccatttactaagcaagtgactctaggcaagctcgacaagagcttattgagggcctggaatttcccaggcacagcgatgatgcaacagaacctgacgctgtggagttgacatgctagcgggggaggtggccaggtacacaaagaaataaggtaattgcacactatggtgtatgctctgaatgacaaacccagggcagtaagacagagtgtgagggctgaggagtggcctctgtgagagcatggcatttgggctgatactttatttttttttttattgatactttttgatatgtagtctcactctgttgcccaggctggagtgcagtggcacgatctcagcttactgcaacctctgcctcctgggttcaagtgattctcacatcagcctcccgagtagctgggactacagaggcacactccaccatgcccagctaatttttgtatttttagtagacacagggtttcaccatgttggccaggctggtctcgaactcctgacctcgtgatctgcccgccttggcctcccaaagtgctgggattacaggcatgaaccactgcacccggctgggctgatactttacgtgggaggaggtgggcataacttagcctccctcagccacaaactcctgctcagtaaaatggggatataagcaccaaacttatgtgttgttggagaaggagaaaatgggaatgtaaggggccaaacccaatctctgactcagagtaagcagtcagtaaatgagaggaaatattattaccatcaccaccaccatcgctatcatcaccaccatcatcattaccacatcaccatcaccaccatcatcaccaccatcaccattatcatctccaccatcaccaccaccatcatcatcaccaccatcaccaccaccatcatcaccatcatcaccatcaccaccaccatcacaccaccatcattaccattatcatctccaccatcaccaccaccatcatcaccatcaccaccaccatcatcatcatctccaccatcaccaccacgtggcatcatcacatcaccatcatcaccattaccaccataacatcaccatcatcaccattatcaccatcatatcaccaccaccaccatcatcaccacatcaccatcaccaccatcatcaccaccatcaccattatcatctccaccaccatcaccattatcatctccaccaccatcaccacaatcacatcaccaccaccaccattatcaccatcacatcacccacatcaccatcaccaccaccatcactgccaccactattatcatcagcaccaccatcactaccactatcaccatcatcaccaccatcattaccaacattaccatcaccatcactattgccatcatcaccaccatcactatcaccatcattatcaccaccatcaccctcaccaccaccatcactatcatcaccaccatcatgacaatcaccatcatcatgaccatcaccattaccaccatcactaccactgtcaccaccaccgtcatcacccccattattataatcattatcaccattaccatcaccaccatcactaccatcactaccaccatcatcacaattattaccatcattaccatcaccaccactattgccatcatcaccaccatcatcaccatcaccaccatcactatcatcatcacatcaccatcactatcatcataaccatcactaccaccatcatcacatcaccatcatcacgaccatcaccattaccaccatcactaccactgtcaccaccaccattaccatcaccaccattattatcatcattatcattaccaccatcaccaccatcatcagtccacacctccctgagagctgtgatgaggaaagcacctgtggatcaggcactggaccgtaaggcaggcatgacataaagctacaagagcagtacctggaaaatattggagaggtccctgaggttgaagacataatgaaacttaatggccgtgggaagaaatgttgccgtgattttctgatgcaaagctgttagaggaaaaggacgtgtcaattctcatgtactcttgatggccccaggaagtgcaagcctcaagtttctaaagccaatggactacgaaatggtgacaactggagtaagaaatctgcacagctctttgaagtgggagggaatttgctgttctccttaaatcatttgtgtatagaatttcctagcccctacctccccatgaagcaattgtatttcacaatttctcctgtcgaaacatagcatcgtttttaagatattgatttagaattataaataaaatatttatcaagggaaaatgtgaagaaccatcagcccacagagccataggttttaccgatgggagaggggatgaggccagccagcttacccagggccgcggccaccagctggctgcttatcctctggatagccatggagaccgagcggaaggccaggtgctgcgtcaggattgtgttgtagatggtggtgagggcctcctggccggggaagctcacagcaaacacgcagaaatggcgctaccccaaaacaaccaaacactccagtcagccagctcttggggacctgcctggggccagggccaccttcgcgggagagtggcccctgtcctcatgttctaaggtcttttgggcattgtcagaatgggcagttaccctccttgtgccttgcatgtggtaaaactgcattaagtatcattacacatgaaacagacaaatttacttcatgctctcaagaagaattttggcaaaggcaagagatgggctcagagtacaggcctgggtttaaatccagatctctgtgtgtttagataacttagaggcaaagtctgtctgggtaagggctacagataaaatacaggatgccctgctaaatctgaatttcagataaacaacaagtacttttttttttttttttttttttttttttttttttttaaaaaaagtatgtcccaggccgggcacggtgactcccacctgtaatcccagcactttgggaggccgaggagggcagatcacttgaggtcagaagttcgagaccagcctggccaatatggtgaaaccccgtccctactaaaaatacaaaaattagccaggtgtggtggcgcacacctgtagcctcagctgcttgggaggctgaggcaggagaattgcttaaacccgggaagcggaggttgcagtgagctcagatcacaccattgcactccagcctgggtgacagagtgagactcagcctcaaaacaaaaacaaaacaacaaaaaaagaacggtatgtcccaaatattgtatgtaacatacttagactaaaaacatatttatttatctggagtttggatttaactgcaattttatttgctaactctgccagttgaccgggtcacagggaaggctggctagctgctcatcctctccatgccctggaattttctgacacattctgcaaagttaaggagttctccagaaaatgtcggcctgcagccctaacaccctaaaccaaagcttttcctctcatttgccagaagcaagcctcagactcatggcaggtgacggggatgagtatggtttctgcttacctgaagcctggagtcgatggtgaaggatccggaagtggggttcatgcaggccacgtactgacaattatggatatcttttaacgtcagcttatgtctgtcatacctgaggggggaaaccagcattcatgttgtgcccctggcctggaggaaccatcccctgcccccactgtgctcccaagaatgccctccttattattatttttttgagacagagtctcgctctgttgcccaggctggagtgcagtggcacaatctcggctcactgcaagctttgcctaattttttgcatttttagttgagacggggtttcgccgtgttagccaggatggtctcgatctcctaacctcgtgatgcgcccgcctcagcctcccaaagtgctgagattacaagtgtgagccaccacgcccgccccccatcccccggctttttttttttttgagatggagtctcactcagtcactcaggccggagtgcagtggcatgatcttggctcactgcaacctccgcctcctgggttcgccccattctcctgcctcagcctcccgagtagctgagactacaggtgcccgccaccatgcctggctaatttttttgtacttttagtagagactgggtttcaccgtgttagccaggatggtcttgatctcctgaccttgtgatccgcccgcctcagcctcccaaatgctgggattactccatgtggtcttaaaaaccctccacagatactgataatatgtgaagcagctgctgtgacttcatgctctccagagaaattttgaaacaagaggcaaaagagtggctcagagagcaggctggggtttatgttccagctcttcccctaagcagtgctggggctctgggaagttggttaacatctctgtgccttaatattctcacctgtgcaatgggtcatgaggaggataaaatgagctaacatatgaaaaaacactgggaagagtacctgacatacagtaagtatgcaataaatattcaccatccctgttatcaggataattattaatggctgctattattaaataagctgaataggccaggcacagtggctcatgcctgtaatcctagcactttgggaggctgagatgggcagatcacttgaggtcaggagatcaagatcagcctggctagcatagtgaaaccccatctctactaaaaatacaaaaattagccaggcatggtggcaggcacctgtaatcccagctacttgggaggctgaggcaggagaattgcttgaacctgggaggtggaggctgcagtgagccaagatcatgctattgcactccagcctgggcaacagagcaagatttcatttcaaaaataaaataaaataagctgaataatttccttgatgtcacactacactagttacttttttttttttttttttttcccccgagacagggtcttgctctctcaccccggctggagtgcagtggtgaacacagctcacggcagcctctatctcctgggctcaagctgtcctcccaacctcagcctcacactaccatgcccggctaagtttttgtagagacagggtctcactatatgacctgggttcaagtgatcctcctgcctccacctcctaaagtgttgagattacaggcctgagccactgcgcccagcacttttgtttttttcccccattatgcactttgtgtgttggaagttgacgtctgttagtttctagtaattccttgtatatttcagatattaatccactgtcaattttatacattgcaaatgttttcttccattcttttatttctccattatatatgtccatggtgtctctcactgagcaaaattccttaactttcatttaaatcacagccatcaattttttgcccttctgtgtgtgcctctgaaacttttgcctgcgcagtcctctcctgtgcacacttctcaggtcacagatgttgtccctgtttgcttctgcccacctcacagctcaccctttccctgcgggcccatccttcccacgggccccacccttgtctgcctttttcttccacaggtgagcattttcctgacacatccactaaacagtccatccttccctgttgtcgtggggccatgttaatctgatattctagaaggatcttttgaaaactcaaatctcactctgccacccctcctgaagatccttcagggtaaactccagggcagatgtggacctagggctgaagcttaagaatgtggaggctcctccttgaggaaaagaaagcaaaaatcttaaacaaattttacaagggcacatgaccgtgtgcaacccttggaaggggcctcgcgagttgcagggaaaccgaggctgagccgccacagccctcacagtagacctgcctgcagagaggaacgggtgggctctcatgcatgcacctgtcctcctctcctgtctgggtaccctcaaatctcccaccccacaccacgttaggttctcctcaaatgatgtcaaactctctccaggctccctcctcagagtggcagctttgtcacctcccccagggagccacctctgatgcctccgtccccacatcacagcctgcagcccagagtaggcttcctatagtcgtgagctctgggagtgtcgtttagtgaggaaaaggcaagtgatggagtcagacatatctgaactcaaaatccagttctggctgagcgtggtggctcacgcctgtagtcccagcactttgggagcccgaggcgggcagatcacctgaggtcaggagttagagacctgcctggccaatatagttaagccccgtttctactaaaaatacaaaaattaggtgggcatggtggcaggcacctataatttcagctacttgggagactgaggcaggagaatcgctggaacccaggaggcagaggttgcagtgagccaagatcacgccattggactccagcctgggcagcaagagcgaaactctgtcttggaaataataataataataataataataacccagctccgccactcattaggaccatgacctcaagtagactacctaaccccccatgcctgcctttctcggcatgaggccaggcttcatgaacgagcagactagtttctaggctcttttggcctgagctacttgcttattttaagagacaactatggctgggcacggtggctcacacctctaatcccagcactttgtgaggccaaggcgggcggatcacctgaggtcaggagttcgagaacagcctggccaacatggcgaaaccccttctctactaaaagtacaaaaattagccggcgtggtggtgggcacctgtattaccagctactcaggaggctgaggaaggagaattccttgaacccaggaggcggaggttgcagtaagccaagatcgagccattgcactccagcctgagagacagagcgagatttctcctcaaaaaaaaaaaaaaaaaaaaaaaaaaaaaagacaactgaactgaatgttctcatctttccaaactgcaaacctaaacgtgccacctttggtttctcggtgccgttaggagaaaatctgcactctgtcccgaggccctgggattctggctgcagctgccctgggcaccctctgcctctggctctcacatccttgccacaccggccttcctgggcttcttcacgtgtggcagggcatttacacgtggcaatctctccacccagaatgctctccctctaaggtcccacagccagcaggacactgctgccagcttccagctgtgcaccatctccccaggggcatctctctgctggggctcccagctgggaggctcctctgtgactgcactgggggttttcctcagggctcttcctttaccgggtaatgtgcttcttcctctcccggcgggacagacacctcggtggaaggggggaaggaggatccccccctccgcgggggctctaggccactgctgcatgtttgtgaaatgggtgatggacgaaactgatagaacctctcccctaccctggccctacctcaatgccttgtggccccacaaacttgggggcccagctacgacccgtgtctccctacccacgttgcagcaccccccccaccgccccacaccagtcctgccctactgccctggggctccgcctcttcctgcgccccgccctggccccgccctcaccgccccggggccacgccttcccctccggccccgccccgtctaaccagtgccggtggtccatgtgctgccggatgagggtgtgcggggccaccgtcccatacttgtccacctcgggcatgttcatgtcgtcgatgaagtagacgagcttcttagtgcctggcggcccgtagttcctccccgatttcttctccagcggcttctccagcacccctagagagggcagagggtcagctgcccgcctgcgcctcctgagccagagcctgttaggtagggaggggcgctacctgcttccccggaggacagaaggtgggacctggctgggatccaagtttaccaaaggtacctgccctgggagtggcccttgagggggcaccgggtacagccccaggaataaacagagcgatcagaggcgagggtggcaggaaccttgctctccgtcacctttgggtcgccttagattggctgagacactcccgggggacctgctgcctcgactggccatcaaaaccccatcaccatgcccacaagggagcaccagaaagaggggtcccggctgctcctcctctgtctccgactcaggaaggaaaggccagcgggtggggcatgggaagtgaggaggtgcaaagtggctagtgagtgcctgggcctgcagtgagaggggacaggagggaacggggactggcggggggcagccgggtaggcagggcgtggccggaccagcctcaccctgcagcatggctgaggtcgtgtagaagttgaagggcacagcctgcaccaggtagttgtccgtgttcaggctttccagcttgtcccccatcagcaccgacttgcccgtccccgcgttccccaccagcatcaccggccaggacttctccatgagcaggtccatgaagtagcggatgcggatggtttccgtggtgtggaccaaagaggcctggggcaggggagggaaggggagggagctgtgattctcagacacttctgcctctcgtgggtgtgcaggccatgttctaccgaacaggtcctaatgttgaaaatcggttgtgtttggacattccgtgcaggcgtgtggagggtactgcaccgattcctgcctctaaatcaccagtcggtggccctgctttggggacagttacctgcagtgggacatcgggatccagctcaaaggagggcactttatctgtccagggcaggaacttttttgtgtcaggatcaatgtagtagtcaaaaatcgttccctgcgaggggaacttgatagtcttgaattcgttgatccaccatttactgaactccactcgataatccacaagctgttgagacacagaagtaaaaatcagggcccagctaagcaggatgctgagagaccctgtgtgggtggccgggccccccaggtgcatcacctggtcctggaacatggcgccaccgaaggcccagaagcaggtgaacacgaagtacagctcgtacagctccctgggggagtcggggggcacggtcttctccgtgagcaggcactccagcaggtacagaatcgtttggatcaccgtgatctccggcactggcgtgatcttcttgaacccaaagcgcaacttgtccaggcacgtgggcaggtacttgtcaaagaggatcatcaggttggccttctccgactgcaccttgcgcctctcgatccagctgctcaccaccctgggggtgacaggaggcgccgatgacacagccgctgctctgggtctgccagtgtccctgccttggtaaacgcccctccctacctccacccaattctgctggggctgccctcagggtcaccatgcctgcatggcaatgggtccaaacgagggtgccagaggggccagttgcaggccctgaaagggtcggaggaggatgccagggtcgtgggggctgtgccctctctggggttgctagctatgggggtgctgtaggtctagaacagttggaagccattcttgctaccacacgggaagcacataccaagggctggtggatggggcagaacagaaaaggagaaagatctcatgatgtcatgtggggggcacgaaggtggggacagtaagggagcagaaaggagagacaaggataggagcagggacatttcattacatcatctggactcctgaatccagccatgcctgaagcaccccttggtgctttttttttttttttttttttaagcttcagttagtttgagttgaatttgccatgttcagtgtaagagtacaaatcaatacaaccagcaatccttgaagagccgtgccagactgttggccacagacatctctgggtggctcgtgtggaggtggcccaccacggcggtgaggggtgtggactctggggcctgactgcccaggcttgagtcagctctaccatggccagctgctgctttaggcaggttactgcacatgcctgagtccctggtttctcatctgtaaacaggggtgatgtttccatgaccctcatttccaaggactacatgggctgatatttttaaagctcagagaagggggcctggtccagggtaagtgttgccaaatcagcatctgctgaaagcatcactagtgcctggccccctcgagtgccagtgagctcagcacgtgcatcatttccaggatgcccagggcctaagcaggaagctcctgttaacacacacagccagcctgccctgcgctgaccggcagacgtgcctctttagacagagactcattttttttcttcttctgagatggagtcttgctctgtagtgcaggggtgcgatctcggctcactgcaacttctgcctcctgggttcaagcaattctcctgtttcggccttccaagtagctgggatcacaggcgtgcaccatcacacctggctaattttcatatttttagtagagacagggtttcgccacgttggccaggctggtcttgaactcctgaccttagatgatctgcccgcctcagcttcccaaagtgctgcgattacagacatgaggcactgtgcttggccagacacacactcttctgtgagtgtgctctgggggagctccgcttcttcctgaacctctatcacaagagagaattaagagctgaacgtctttgccgcatagcaccctgtattatccagcgtaatagagtaaacctttctatgtccctaagcgaatcagggtgtctccatgcctgtcgcaactaagaactgaattccaagtccagttggtcttcagtaggggagattgatttgcaaatctacgcagaggctgctgctttctgccttctactttgaagatgtttgtgtcaaaaatttgtgatgctgccttggtaggagtcactgagtgcgggtcggtgtgtgtgctgtctctgatatgcgtagcacaggccccaggagagacacatgcttgcgagacaggccgactttctcacctctggtccatacggcttcttgccctgtccccaaggccatcctgggtgcatccggcatccctgcccctggcagttgcctataggagggctgctcctgctgtctggggaccctgtgtctgcttctcgcccatttccattctctcctctgccaatactcaggtctcctcctcctgcttcctccaggtcactccttggaggtgtccagttcctgccttggcccacgctgccttcgtttctggctccctcttctctgctcccatagggtgtccccctgaggactccacgatcctgtctttttcctgtccccgtgtctcagcagctcctacccaggcttcatttcagttccccggacattgtctttgcctaccctgaaaactcccacacatggtacagtgggtaggatggtggtgctacaaaagaatgtccacccagaacccagaatgtgccctgatttggagaaagggcattagcagatgtcatcaaggatcttgagacaagatcatcctggatttagggtggaccctgaatccaatgactgtgtccttataagcaaatgggaaatttggacacagacatacagagaaggccacgtggagacagaggcggagatgggaggggtgtgtccataagccaagggatgccaaggaccgccgagagcccccaggagctgggagagaggcctgggacaggttctcccgcagagcctcagagggaaccagcactgcctactccttgacttctggcctccagcactgggagaggataaatgtctgttgtttgaagctgccccattagtggtcattgtttcagcagctggagaatgctgtataagcaggcaagtgttgctggagaagccggcacagaggcacccaggctcagcagctcctggccctgtccccatagggaacattccacttggtatccctctcaaaccctggccacactgtgctgcctgcctcccagcagagggtctcacttcccacgcagagagcaaagaagtgcaccagcatgaactccggaaacttaattttctctgcctatagacttgcatgcacctgaaaacagccatgcctgcatcccatggccaaacatcattcttgtctcgacaaatactacaaagcttcattcctcttgttccagccctaccctccagcactccaaggcaggactcgcctcacttctggcgcctcctgctgcctcctccatacctcattgccatctggctctgccctcaacacgccctgaagctgttctccctgagtgatggagatgcgcctagctcccaaatgcaatgggaactcttctgtccttggcttgactctgggtgccatcctactgaggtgaatgctccctcctgaagcttttgttgctgggtgtctgggatgacgcgtcctgggttcccttctgcctttggtttgttccacctgtgaatccctcacatattcttcttcctcccccacggtgctggtttttctcagaaaaccagcttttttcatcactctctacatctttcctggagagcccagctccccagcatggaatatcctggggttggacacacatggcaggtgtgcgaagtactgggtgggcgggagggtgaatggatgggtgagtgggtgggtgggcggatggatggatggatggatgaactgtgacctccagccaagacgctcctctggagcctcttgcctcaggaacacctcactgggatttctgcctaagtccacgcaggacatttgcacaaagctgtcatttctatgtccccaggaaatcccttactctgtcaatcaccagccacgtgtccaagcccgaaaatatgcctctggaatcaatatcaagtcttccatttctccagatttcagatatttcttaaacccatcccttcctctctgatccctagaggcccccatcttgctggcatgaccagctgcttttccctcgtcacattggaaagggacacttgcaccttggcccagcatcagcgccttcccgtcaggagcagcctccgcctttatgctctggccaggagaacccgaccactgcccatccggcaatgccccactccccaccatgccctgtgaacgcgggttcttgtctggtgtgcttctctgttttcaccccttagaggcagcctgaccctttggatggcagcccaaacttcaatcacctgggaagacttcccacctccacagaggccaagacctcccttcccacaccagcccttgttccctggcactttgtgcaaacatccgtttgctcagctgccctgcctcgtgtcactgtgaatttacaccatttattcccaggtctctcaccccttcactgctgtgacactggtgcctggtgagggcctgatacacagtttgtgacatgaatgatgaatgaatatgcaactctgaaacaggccaacaagttcgtttttccctgccgaggtttggaacaggaaagccaaagccccactcacgggttccatcccaggtcggctgggttgatgtagaggatgccggctctggaaacggtggctggggtggccgtcctcaggtggctgatttcgaacaccagcctcatggtgcggttcagggggatccgctcgttgctggccagggtgaggacctaggagggggacagcagcccgtggggtcctaaggcgacacctgccatcccaatggtgttctggggtgggggttactcggagcaaacctccgagcaaggaggaggggcccaggccagccctgccacccctggcccacagccctagtcccttggcccagggcttctctgccttccctgaatccagcagcctctagacgcccacaccgtgagggctgcagcatggagtcagggctgctttctcaaaccatcacccctccccatcctggaaagtattgtgttccttcctgcatccaactgaggagcatttttagaaaatggcttctagacaattctacataaccatttctgcttcccaggcctttactctgaacccatcctgctaaaatgtaaggtgaggcgcatgcaaaaccacaacgcatgtgacaaagtctcacgacaaggtgcccctcactcatagcttcctgtggagatccagacacgccacctgcgccaagcctggcatgcagggcctgagtgctccgtaggcgcctccctgtgagcccccgttgtccctgccttgggtggccttggggcttagagtccagggcccgcgaaccttgttgtcatccatgactgtgttgagagactcgatccacatggggtctatgtctccgtcaaggatgatccacttggggccgtcatgggtgatgttggccaggtctcgcatgatggtggagaacaggcctgggggaggcgcgtggtatgaccccgggcccttcactccggccccattccagtccccaccagtcctgaccctggcctctctctctgggagggagcctgtcccctacttcagaggaacagcagaggccctcgggcatgaggtgcccaggctccctgccctccgttctctgtggcctccctcctacgtgccctctccatgcctgaggccctgcctgtcctcctccgaccctgcaccctccctgtcagcccctctttgtggccctggctggctcagtttttccaggctcaacatcccacggggcgcagcacctgtgcacccagctctgtccatctgtccactcacacgctcagcagaagtctgcggagcacgcttcatgcgtcaggcatggaatggagcaaggtgggggctgggggtacagagcttgacttctagtaggggaagtgagctgtacatgcagaagccagcgaagggggacagggaaagcgggtcaggggtagggccacttctgatgggtagggtgcgggggacaggctaggcacagccctcccctaggctcctggtcaggaccaccctgctcccgctgactcctcctcagctctcgcagctcctttctgcagcccactctccaacgtccggagttcctttcataaagtgcaaacccagtgacgccacctcctgggggaagcttctccccagagcccaccgactgaggccagggctccccgggcagcctccagcctgcatgtctgggctcccatgcactcctcacgggtcacacctgtccttgctctgccctctccccttggcctgctcggggcaggcctgcagtcctcaccgtcccagctcctgtggcccccattccttatcccccagcccgggtgctacgtgcccactgctccccataaactttgttaccatggtgccaccattgcaggccacgtgcctgtgtgccccaccctagcctggggaggctggccttccacgtgggaacggctgagcacacgctcactgcactggaccaggagtgcccctgcagcctgtcccgggaccaccctcgttaccatctttccattccctggtcactgggttgatgatgccaaagagctcgtcgcaggtgacggccttggggtccaggtccacggcgaccggcttcctcttcaggttctgataggtcttgttgagggatttgaggacctggcgaaggtgggggtcactcacgtgtgactccatgttcctggcacatcctgccccactagcctcaggaccatgggtgggcctggatggtttttttttttttgagatggagtttcactcttgtcaccgaggctggagtgcagtggtgtgatctcagctcactgcaacctctgcctcagggttcaagtgattctcttgccttagcttcccaagtagctgggattacaggcgcccatgaccacacccggctaatttttgtacttttagtagagacagggtttcaccatgttggtcaggctggtctcaaactcctgatctcaggtgatcagcccgccttggcctcccaaagtgctgggattacaggagtgagccgctgcgcccggccctggatgccttttatgaaccaccaggctgaacccttctctggatcacgtttgctctggagacacacaggtgagtttacaccccccaaccatggctgaggcgaaggaggcctgggtgatgggaagctaactgttcactgtgcgtgtctgcagcccgcagagagctgcttgccctagactgtgcgaggctctgaaaacattcacattcctttcttcctcatggtacaagtaatacgcactcactgaaaaaccatctaggaaaactccccacaatcctccattcagggaaaaggagctttaaagacacggttgaggacatttcctgtatgtgtatgtccgagttcctttttaggaaactgggtccatgcggcctctgccttttaaaacatcacttctggtgagcttccccatgtgactggcggtgggagtgatctcaaacaatagcagaagggtccagcctgtgggcctctggccggacacttggctggcatggaattttccacatcacagacatcagtcacatccgccaccaccctccacatgtcaccactccctaggccatggcaggtgacaggagggcgatgggttgggccggccacagggacagggagacaagtgactgacgtcaaggagagaagagcaggaagacaaggaggaacagggagggaggcctcacccagggatcagggatcaggggctgtggcagctcctcccctcctcctcggcccccagcttcctccctggcccatgactcaggccggagggctcccaggatgtactgggttggggtctccggggtggcggggagtgatggagggccgacccttcgccccagccctcccccaccatgccggatccctgcaaggtccctggagcgggtgacacacctgagatttgccgctgcccgcattcccgacgatgaacacggagtggcggacctgcagcagctcctccagctgcaccaccttcagcacgaagctgtcctccgcctgcagcttgagctccacgatgctctgcttgatgatctggggagacatggatgaggctgggtgaggaactgaagcagcttttctttcttctcgctgggaggctggggggcttcctgccccgtgggggagatgataaaggcgcccttgccctccgatgcacgtgcgtctgcaagttctgctgtcaatgccgagagttgacatagctccaccgcgacctcatgcagggggtcggtttgcctgaagcccccccagcctcagttgagagagtgacctcccccagcactgacagggtggggctggccagggccacggaggcagctgtggctcagaggtctctttgtagcatcgggaaacgtgcgtgtgtgacacgggtctccacccgtccaacatcagtgggaaggaagccccagccaggcaggcttctccggacagacctgagacccaggagtcccgaccttttcaaaattcaggtcccgtttccgaggcacgtccagagccgggaagaggtccccgatcagtcccatgaatacgggcaggtcgtctgtcacaatcttggggatgttgaagtctctcagcgcccgcatgagcacctggtcctctgcccggctggggtcgcccctcttcagggagccggccaccaccagcacagacttgatggctctcaggccccagtcgtaatgatcctgcgggcagtgggcacaggtgggcagacgtgagctcaccttcctgtggccagcaggcaggtctggaagccaaccctggctgctgcccgcatctcaaactcccacccacacccgccgtgagctccaggacacacacacctgcttcgagagcagctccttgcacaaggtgtacagggtgatgaacttcctggccagaaggcgggcttccagaaagccctcggccatgagcatgatctcacatatcagttcgaagtcggggacgaccatggcacagggcctggggaggtcagcggtgcctgtgggcttctgcccactccctccccaacctacacccctgcctgtccctcttcacctaggagagcacacctcgactgccaggtagaccacagcagagtgttgaaccttcggtcctggagccgggctcccagcccgcctgctccctacttccctcctcctcccacatcatccactgggtgcaccttcagggcccctcctctgagagccaccccaaccccccaaccctgctttccatcactgtgtcccaggtgcggtcctcccacccaggggaagacagagtgctttctaaggaggccctcgcctgcctcatcctgggagtgtttttttttttttttttgagacagagttttgttcttgttgcccaggctggagtgcaatggtgccatcccggctcactgcaacctccgcctcccaggttcaagcgattctcctgcctcagcctcctgagtagctgtgattacaggcatgcaccaccacaccgagctaatttttgtatttttagtagggacggggtttcaccatcttgaccgggctggtcttgaactcctgacctcaggtgatccaccctcctcagccgcccaaagtgctgacattacagaagtgagttactgtgcccggccatcttgggagcttttgatgacttcttccctccccagcttgccctctgcccctcccctctgcccactccttggcactgggacgttgctgtggccggcctggctcactgcagccactcactttcacctgggccacgtacctgaataaggcttttaggttctcaggcagctccgcgcgtccggcgtacccagggttcatggtgatgaagataccgacggtgggaatgaggcctatgatctctcccaggaaattgaatgcttttttcttggcccgaattgcatcctggacacattttacctgcacggttggtgacacagacatgttagcatggaaatggccagcttccacacaccagagaggccttcacatatgttaaagcatgaggctgcgaatttgcgcctgcaaattcaaacctcctagtttattttttaaattaagccttttatttttgagaaagttgtagatttgcatgccatgtaggaaataatacagagggccaggcacagtggctcacacctgtaatcccagcactttgggaggctgaggctggaggatgatttgagcccagcctaggcaacatagcaagaccctgtctcaataaaaaatacaaaagacagtgattggggggaagaaaaaaaaatacaaaggcaattctgtgtactctctgccccatgtagcctgatgggaacatcttgcctaataacagtaccagtcacagcgggggtggtgggcggggggagggtgggcgcgacactgaggccagcattgctgtcaccatggggtgacagccctcttatagccacaccccttccctcttgcccccttccctccgtttgacccctggcaaccatgtcctttttttctgtgatttggtcatttcatggatgttatataagtggaattgtatcatacacgatcttcccagatggactttttttttttttttttttttttaagactgagtgtcactctgttgcccaggctggagtgcagtggtgtggtctcggctcactacaacctccacctcctgggttcgccccattctcctgcctcagcctcccgagtagctgggactacaggcgcccgccaccacgcccggctaattttttgtattttttagtagagacagggtttcaccatgctagcaaggatggtctcgatctcctgacctcgtgatccgcccgcctcggcctcccaaagtactgggattacaggcgtgagccaccacgcccggcccccagatggacttttatcactcagcagaattctctggagatgcacccaggctgttgcaggaaccagtaagtatttcaacaccttgtccctgctgagttgggttccactcccagcccttttctgtcctgttactactctggcaatgacctgtcagaggactggttagcggccacctccgtatcagacagtcttgaaggccaactgtcagctacgaggttaaacctagagcatcaggggccgttgcctgcttgaggtctcctctggaaacctgcagaagacagctgtgtctctccaagtcaccacttgagggggcccaatactcgcggtaaagctgctcccagcacctgcctttccctgtcttccccaggacagccaagtcctggtgccctggtgatcccagacacccccatgcccagtctgctgagcgtgcagcttgtcccctggcaggactggggcctttcggaacagcaccgcttccagctaggccaagcctctcctgtggtctccattggagcccgtgaacattcagtgcccagagtaggggctatataaatattctggggtttgttcatggacgtcggaggtgctcagcagctctgctcctgtgctgggggcaagggagagggtccccacggtaacagccagcactgcccatggtttggggtccccattctcttggtcatggggcctccagccctggggctggggaatgactgaggcagagggagcataaggagaggaggaagcagccaccccaggcacctctaatcctgctggcagacctgtgtcaccaacaccgccttacaggttagaaggtggaggcagagggagtccacatcactgccaagccgagagtcaggggttaagttggtgtataaagcaggctctcagccgggcacaacggctcacgcctgtaatcccagcagtttgggaggccgaggtgggtggatcacctgaggtcaggagttcaagaccaacctgaccaacacggagaaaccccatctctactaaaaatacaaaattagccgggcgtggtggtgcacgcctgcaatcccagctactcgggaggctgaggcaggagaattgcttaaacccgggaggcggaggttcagtgaaccgagactgtgccattgcactccagcctgggcaacaagagtaaaactccgtctcaaaaaaacaaaacataaataaataaataaataaataaataaataaataaataaagcaggctctccacccaggttgtggggcttaagcagcccaggaggcatttgcacgtccacaccccacatgctcctggtctatcctgtggtgggaggaccttgacaccgccaacgccctgacttgcatttccttttggaagagcacaattgtcccaggccgctaggtcggcctccacttaccttagacagcccagtgcttctcaacccccagcatgcgtcaggatcacctgaggcatttgtttaaaatgcagaaatgctcctcctaacaagtggggcccacgctggagattttaacaagcatcagtgggggtggggcgctggcccaggctgctccccaatccgaagtccctgcacccaggtcgccccagccactccgctgcacgctctgtgccccggcatggttgttcccaaaacacacgggcgcatttcctccctcctcctcttcctccctctccccctcctttctttctttcctgccattccctttcagcacctcctatgcccagctccgctgataccaataacaaagcactttgtctttctttcctaagcaaaattaattattctcccacctgtattttgttacacgtttgctaccatacatgtaacctgtaatctgattctgttttcaatgtgtttgcctaaccaggctttgggaccctggagggcaagagctcaatggcaccacaccacccttcggtgcttggaacgttgcagagaggcaaggagggtctatctggcgtgtgaggtcacaggaaagctgacgagccagtcacccgacgtgaccccgaggccgcaggcaggggactttacctgcacggcaatcacagacaagacttccactgagatgcgattaaactcgtcaaagcagccccaggctcccgtctgggccaggcccttgtagatatttccacaggactggaaagggcgagatggagaaaggaagagctgggagggtgacagggagggcgggcgctgcaggggcctccccctgcctcttcggctgtgttttctcttcccaaagcttgctcaggccccggtgcattggagccttccgcaggccagcaggcaggtcagcttactgcccagggtaacaccgtggagggctggacacgaggaagagccatcctttcacccttgcctcccagaccccaggatggggacttcctggagtccctaataaggggctcagacaagcacatttaagttctaaaccttgcatgttttctcagcccttttctttcttgcgtggagaggagagggagtcctctaaggcgggatgggggcacgtctagcaggccggaggctttccctcaagacatctgtgtctctctaggccccacctgggccaatcagaaggactcgtcccatctacacctgggattccaggtggatgttaagtcccttccagggagatccaacttcagatttcacttttctaaaatccaggaggcggatgtggactgcgtggccctgacagtgaacatgggctgctggtcccatcctcagcctcaggagggggcccccagattgtggggctcagatccaagctggggaggggagaccctctgcaggcctagggtccaaaactcagggttccatcccccttgccttcccgtcttgcaagaggctgctgcagcctggagctccgaggtatccccttcccctccctggcctcctgtgagccgacgatgtcctgtgcaggctctaatgactgatgggaccgggccaatcccctgctcccctcccaaacccacctggacactgcttgtaccccaccccatgctgaaccatgagggaggtgctcacccctgtgcggagtccccagttcggggcaatcttaacaactgaaattgagagagggtcacctccagggcaggggctggggcaggacatttggggctgcgtctgtccaccctggaagtctttccagagggaccacctgagggggatgctaccagcaagtgggggccctggcacctcctctccagtgccattcacaggtatccagagatctggagtttactgtggggcctcggaggacagggtgctaggatctgcttctataaaagaagactctgggtccctcctccggaccccggccgcgtaccttgtagtccatctgctcggagcagttgaagacgtagaccatggtgcccagggctctgcccaggtccttggtcgtctcagtcttgccggtcccagcggggccggcaggggctccacccatgatgagatggagggactgggtcagggtgatatagcacctgcaagtgaccacaggtaagcgtgtgtgccagcgaccccatggcctccctgcttttatttttttgagacagagtctcactctgtcacccaggctggagtgcagtggtacaatcttggctcactgcaacctctgcctcctgggttcaaatgattctcatgcctcagcctcccaagtagctgggactataggcgcccgccaccatgcccggctaatttttgtattttcagtagagatgaggttttgctatgttggccaggctggtctcgaactcctgacgtcaggtgatccacccacctcggcctcccaaagtgctgggattacaggcatgagccccaggagacacatgggagagggcagaaaaccttcaggtgtgaaggaggaaccacaaccgtggagcagaggcagcccaggtgcctttcccacctgtggcattcagggaggtgggcactgctacgacaaccagagtctgctcatgagggtccataaaacatgaccccaactcagcaggcccacagaggggtgcaggaactctcccaaggccacacagccggtgctagaacaaggacacagtggtagaactgaatgtgaacacaggtccacctgacgcaaatgcccagtccttccagcctccacagctgacctccaagtcggacagttccaagaatcatgcggaagggacccaccaagagcacatgtgagttactcagggacgggcctcacctgtcagtgagtggggtgatgaccagccgcggcgtgttgcccagatactcataggaatactggatttgggcatcgcagatgttggcaaagcagtgtcgcttctcttcgtcccagcgatgccggagctgggcctgccaggtgaaggcctgagaactctccacctgcaggatgagccggagctcttgttgccaggtggaatacaagagctagggctgcctaaggaaggccagcatgcctccaaggccggtcccctgctgcccagggaaccctccctggccctctttccccctccagcacccacatccaactgtatggccaccctcagtggaatctcgctacagaatggcacttccaatgggcgggcaccgctcatctgactgctgtgtgttgctcaccaggggtgagtccgggcaaggaggttaggaggcagctgcagccagcaacagagtcagtgccccaggaagaggaagtggcagggtctgaagtccctgaatgcactgccctgaacccggtgtccccttgcccttcccctggcccctgggacaggggcgctcatgccttggccacgatcattttggccaccacgtcccgtgcgtgcacatcgatggtgcagatggtcatgatcttcatcctgtcgccagcgttgaggttccccatgagcagcgtgatgagtacgttcagctggctaatctgcgggggagagtgccttcgatgagacaccacgggtgcccacatgcactggggggtcttgtggctgggtgcccacagctgcatagggaacaccaccatgcttttgtttacagtaatgaaaaacaagagcgccctcggtaggccccagccaggcactggtttcaccagggtgcggccctgatgggacacctggcagtggctagcatggacgtagtagaaggaaattcaaggccacgagagagggtggatgagaagcaaaaacagctgactttaacgccatccagagtctgtatatttttacatataaatcaattatacacacacagagtaacaggttgcataagggccctgcagtgtcatgcttgggttgtggaattacaggtaaattctccttcttttcaagatgatcttttgtttccatatttctaaccaaggacattttttttttaaagactctcagtagcatctgccaattttcaggcgagaaatcaaagtacatatttctgaaggtgtctgttactcgtggggagaggtgcctggggctgtggtgcgtggctgttatttggcctgtggaaacgacggttttgcggggctcagcctccgagaagaagccgctccaggtactcgcccggcaggtttcagaaggatacacgggcccatgcacctgctttttaaacaagttttaaaaacgtaactaactacacactagtaacacacctgctttttgttataatctctgatagcgttttcatagccttcctccagcctggcaaatgccaggcccacctcggtcgtccaccagatctgggtgcaagtcagggccacctgaaagtacataccccccattgcccacgcagtgagcgatcgctggcgcctgctaacgcagacattcctgctgaaagcttagatggttttccaggggaccacagttaacagcggagcccatgaacgcaaagaaactcgccccttatctcagccacgaggcgccgccgagcccccacccgcctcagacctgggctgggtagtccaggatccactgctccctcggcttctcttcgtaggtcaccacggcctctgggatttcgtgccggagggtagagcacattcggtccagcactcgattcagccacacttccacctggggacgggagccacggtgaccaatacagccatgtgtgcctgcctctagttccaataattttgtttgtatttgttgtaaagaaaaacatttctcatcatcctcatcccaggggcagacaggtcaaggattttacagagcagtaacagtgacacaccttttttttttttttttttttttttttttaagatggagtcttgctctgtcacccaggctggagtgcagtggcatgatctcggctcattgcaagctccacctcccgggttcacgccattctcctgcctcagcctcccgagtagctgggactacaggcgcccgcccccactcccggcattttttttttttttgtatttttactagaggtggggtttcaccatgttagccaggatggtctcgatctcctgacctcatgatccgcccacctcggcctcctaaagtgctgggattacaggcatgagccaccacgctcggccacatattttcttcttaaattgagataggatctcgctctgctgccccggctgctgtgcagtaactgcagtcctggctcactgcagcctccacctgtgggctcaagcgatgcttccacctcagcctctcaagcaactgggactacaggtgtgcaccaccacacccggctaatcaaagactcacctaaaaaatgtggctggggtccaggcgcagtggctcatgtctgtaatcccagcactttgggaggctgaggcgggtggatcacctgaggtcaggagttcaaaaccagcctggccaacatggtgaaaacccgtctctactaaaaatacaaaaattagccgggcacggtggcaggcacctgtaatcctaggtactctggaggcttagacaggagaatcacttgaacccgagaagtggaggttgcagtgagccaagatcgtgccattgcactccagcctgggcgacaagagtgagactccatctcaaaaacaaacaaacaaacaaaaaacaaatgaacaaaaaaaaaaccatactcacaaaagtaactgccactgggagaaaaaaaccctcaagtggacatgagggtagatttttttttttggagatgaagtctcactctattacccagactggagtgtagtggcgtgatctcggctcactgcaacctctgtctcctaggttcaagtgactctcatgcctcaacctcccgagtagctgggactacaggtgtctgccaccacacctggttaatttttgtatttttagtagagaccagtttcgccgtgttagccaggctggtcttgaactcccgacctcagatgatccgcccacctcgacctcccaaagtgctgggattattggcatgagctaccgcgcccggccagatttttccttttaactggaaacacagtgcaggcaggcctcgctgtggtctgcagttctgtttgtaaggggtaagcccaggaagcgaatctagacagatgctgtcaccaccccacccaccccacccaccccatccacgtagagcaggccacgtgtgtgctgtgttcaactctttgaacctcaggttttctcgagatttttttttcttcttcctacaactgatttacctctgcattgtattttcctcaggctgatgttaaaatggtttctattgcttgatcaatagttgggtaatgagacaggggagggggcagcccggaagttttctgacggcagaaggagcccgccctgagccgggggacgcgcttgctggggaaggaagaggctgtggagaccactctgagtggtgggctgtgcagccgattatttcagacaggtgatgggaattggcagttcagagatgtgcaaccccttttaaagcagtccctttggcaaaagccatggaaaggattcaatgatattaacagggctttttttttttttttttttttttttttttgagacggagtctcactctgtcacccaggctggagtgcagtggcgcgatcttggctcacggcaacctctgcctcccgggttcaagcgattctcctgcctcagcctcccgaacagggcttttctcccgtcctttcccctcccctttctccctaaggatacactggtgctatatgggtaaggctgggctggaaattctataaagaggcccatcccttaagtgttttctagagagggagaggagaggagcaggggcgggctggcagctgcacagggtgctggttctccggacatcgccatctgagggcgtgtggcccacacgcgtgctgcacccttgtcctgggttccctgtgtggtgtgcgcacacactcacctgccccgagaggtcgcattcctgatcaaaaaccatgtactcgtcctccttgctgtacattcccaggcccaccttgagaggtttgtcactggcatcgagccggaacttcagtttacacaggctatcgaagagtttggacaggtggcggctcacctgggaggaggcaagaagcgggaattatgcaacgggggatttgaaaggcatgtgcgtggcttgggctttccgtgggtggttttaggcatcgttctttttggaatatactccccatctttgatcaacgttgactaaacatgactaagtcaacaaaaggaaccagcgaagactgctctgagtcaggacacagaaaccaggccaggaaccgcagcccttctaagccaaacatccattctggaagatttctttttggtggggcatggtggctcacacctgtaatcccagcactttgggaggccgaggcaggtggatcacccgaggtcaggagttcgagaccagcctgaccaatgtggagaaaccccatctctactaaaaatacaaacttagccagacgtggtggtgcatgcctgtaatcccagctacttgggaggctgaggcaggagaatcacctgaacccaggaggcagaggttgtggtgagccgagatcgcgccattgcactccagcctgggcaacaagagcgaaactccatctcaaaataaaaaaaattaataaataagatttcttctttttgagaaggttctgtcccagatcccaagccacacactcagtctattcttgcatatcccttcttcttgtgtaacctctaaccttacggtcaaaataaaatgcaagcgctttcccttcacctagttaattttttttttttttttttgagacagagtctcactctgtcgcccaggctggagtgcagtggtgcgatcttggctcacggcaaccctctgcctctcgggttcaagcaattatcatgccacagcctcctgagtagctgggattacaggtgtgagccactgtgcctgacctcttttctcttttagaatagccccaaggaggcacctgttccttgctcttgggaccctgagatttaaccagctgaccagagcaagacccactgagaggtgtgtctttcagaaacagtgtcttactaagcctctggcatacgacccattttctagaaggggaaaatgaggcacagagaggcaaattaacttctcaaaagccaggccaagtgcagagcaggatgtgaggcgagtcctgccacgtttctgccatggctggggaccccagggcagcttctggtgcagagggcctcctggagatgatggggcacgtccaaggacacttaccccaccctagggcggttgaggtagaggtgcccacctggggtctggcatgatgttggcttaaacaccggaatgcaaggggccccgcctacctccacggggtcattgccattggagagaatgtccaggaggtcagccgaggagacaaaatagaaccgggggaaagccagtcttttcgtctctaaatactctgccaaagccttttcacagatggccaagctgggaggaaggaaggaagtagaggaggccggtgaccctactctgtagggatgtctgccacccaccctgtcggcgaaggaaactgatcatcctggagatgcctggactgctgttcacaggcctggtttaattcagaatctcctaccggaggctctcgtttctttgccatcccctgaccttgtgggcactcctaggcaagagggagcatcatttattctccgggtcattgcttccttcaaggccaaggcatcacgtggtgggatgaggccggggagtgtgtgctccccagggaaaggcaattgattaacccaggacccatggttttgccctgtcctggccagcaggctgcacaagacttaagttccgtcagacttaagacttagggaatctgcaccactgactcccctggtctggataggtgtgagccgcacctcttcttcagggcctccagtttattgtagaggccgggtttgctggtggcttccaccacgttgggtgttttcactgcatcttccatcaaggcctgggaagagaaggggatcgccaaggcattagggatcgccacacacagtcatttctgaagtgcgtgggaaccaccgggctgtgctcaccttgaattcctggttgatgtcgtcaaagcgctgggagtcccccgggagctgggtgcggatgtcttcggagccgatgaagatgctctccaggtggctccaggttcgctggacctcaaaccagatggagatgacggagtccgccgtggacagcttctgctgccagcttgtcacctccttcaggaagtgggccaggtacttggacatcatcaggttctgcagctgcacctggttgtcctccagcgtctccaccagcacctcgctggacttgagcatcatggtgcctgtccgcgggtgcggctcgtgctggaattccatcatgctccaggtactgtccagggctttcagcaccttttgggggaacagaaaaataaggtcactgagcatttggcatgcaaagctcaggcaggacccagagtttccaggacatagactgaagctccatgatcagaaagcaaaaaggctcaaaccaacgtattcacaggagccaaaggcagatccaacccgaaccttcatcccccaatgatggatgcatgcgatctctgtccatataatggaacataagccactaaaggaatgaagtacagacacctgccacaacgcggataaacctgaagaccctaggctgagtgaaagaagccacacgctcagaccacatagtgcacgcaaaggagatcagaacgtgccaccccaaaatatgccatcctgcaattgacaattttgagtcagaggcacttgaagggcagcagatgcaggactctctctctgagcctcatgctgttcctgggaagcaggagatgcaattcccaggtgaatgatgctcttctgataccagaatgaaacgatcattctcatcactaggatgggaagtggaggcggaaagaatcctgtctgctcagacccttttagaacagctctcaccttccagcctcttacacagattacttttctacaacttacgctttctgcaactcagtacttaagtgttcaactctaactgtgttttggagtcttcctttcctcccataccacagaaaacttggatttaaataatttgcatacttttctcctcttgatctatcttacgtcaatggaattctcagacccagctggaaaaaaccctaaaagcatagtgaaaatgttgcctcctctacctatgatgccattcctatgaaagtgtggaagagggggatctatagagggggaaagtggattagtggttgcctagagctggagatggggacatgtgagaggaaaggggtaggggatgatggctaaaggatatgggtttctttttgaggtgatgaaaatattctaaaatttgttaattctattttttatttttatttttttaaaaattataattttttttagggacagggtccagcccaggctggagtgcagcagcatgatcacagctcaccgcagcctccatctcctgagctcaattcatcctcccacttcagcctcccaagtagctgggactacaggtgtgtgtcatcatgtgcccagctgtttttttttttttttgagatggagtctcactttgtcacccaggctggactgcagtggcgcgatctcagctcactgcaacttctccctcccaggttcaagcgattctcctgcctcagcctcccaaagcgctgggattacaggcatgcgccaccacgcctggctaatttttgtatttttagcaaagatgggttttcaccatgttggccaggctggtctcaatctcctgatcttgtgatccacccaccttggcctccccaaagcgttgggattacaggcgtgagccaccgtgcccggtcccccgctaatttttttaaatttatttattttttttgtagagatggggtctgcctatgttgcccaggctggccttctcttgaactcctgggctcaagcgctcctcctgcctcccaaagtgctgggattataggcaggagcccccaccctctgctgttgaatatgtgctgattacacacttgtaactatgctaaaagccactgcacactttaaacaggcgaactgtatggtatgtgaattatatctaataaagtttttttgttgttgtttttatttttgtttttaaagcaagtcaaaatgtgacaattcaaactcacaaaacaggctgaggagagagatttgaaccgcaaaaggagttttcctggatactggaactgccggtagccagtggcgcattaacaagttcaggtaccagctgggggccatcccccacccatccccaaccctcccgtcagctgcggagtcagaagaaacaactgacgtccatggaggagtcagacgggaccacagacaaagacgcttgaggcaaaggaaatgcgagttctggttatttacaaaatgttccaaactattgcatgtacggggcgggcagagctatagccgcaaattgggttttctaagaaaaattccagaagtaggctggcgcagtggctcacgcctgtaatcctagccctttgggaggctgaggcgagcgggtcagttgaagtcaggagctcgagaccagactggccaacatggtgaaaccccgcctctactaaaagtatgaaaattagctgggcgtggtggtgcacacctgtaatcccagctacttgggaggctgaggcaggagaatctcttgaacccaggaggtggaggttgcagtgagccaagatcgtgccactgcactccagcctgggcaacagagagagactctgtctcaaaaacaataaaaaataataaacaaacaaatagattccagaattattttttaagatttgtcacaggttgggtaagaaaggcccgccagacttcccgtgagagccttggggctgcaggacccctctgggcgctctcagtggttggagggggcagtttcaggctgatcccacgttgcacagacagcaccgccagcacggcctaccttttccatgcccgactccttcacggccttgtccacgatgttgcggacctcatcctcgtaactgtggaggttcagctgcagtaaatctgccagggtcgtctcttctgacattttaaatttcacctaagggaaaaaaatccaggcaggattcatttcaggtcatgtgcactctgcagtgggcagacgtcatgatccttcatggagagccattgccggggcacgatcccgggctgctggagggagggaggcgagctctgctctgccattttcagctctgagacttgaggaagtgacttctccaagcctcaccttccttccctgtaaaaccgcataagagcagaacgcacctgcactgggcggaattgcggcccccccgcaaaattcacatccgcccagaaccttcacgtgtcaccttatttggaaatagggtctttgcagatactaaggatcttgaggtgagttcatcctggattttccggtgagacataaatccagggccaagtgtcctcgtgacaggaaggagagggacatctgaggcacacaggaaagagggccttgtggagaccaaggcagagacaggcatgatgcggccacaggccaaggaatgcctggagcccccagaagctggaggaggcaggaaggaccctcccccggagcctctagaaggagtgcagcctgctgacaccctgatttcagagtcctggcctccagcactgtgagaaaacacaggtctgttttctttctttcttttgagacagagtctcgctttgtcacctgggctggagtgcatcttggctcactggaacctccacctcccgggttcaagcgattctcctgcctcagcctcccaagtagctgggactacaggcacgtaccaccacgtgcagctaatttttgtatttttagtagagacggggtttcaccaagtcagacaggctggtctcaaactcctgaactcagatgatccgcctgcctcagcctcccaaagtgctgggattacaggcatgagccaccgcacccccggctagatctgctgttttaagcctcctggtttgtggtcctttgtcatggcagccccaggaagtgaatccaccacctttggcagctgccgcattcacaataggcaaagcgctctgtggcagtggccgaatcacaggtactgttactctagtaccagatcaccgttagtctagtacgaacataccaggtacttgcctagtgccacccacttcccaaatcgcttccacgtcccttgtctaatattctttttggtgtcacatagtcagatgtttctgagcattgattctgagcccactgtggaattttaaccaacagatggaaccttgcatctctaatcacatttggggacatatgtgcccgaggctcaccaagacctcagctgtgcccagctcctttcatggagatatttagctggttgtttatcaccgcccaagcgtctctcccagggcacccggaaggggcacatgaacctgttaccaggcatccgggaaattttttgtctcaacactcgaaaggcacccccaggggctggctcccagacacccagatccctggggagcaagtgggtgcccctgtgccctcagggtggcctgcatagctgggtttgcttttccttccttgggcctagggagcagaagggccctggacagtgtggtgggggcggagcaggagcctctaacactcctcctaggtgggcaccctcctgggctggctgggacttaatgagagatggagggaaccatttgtccccattctcctacttcctgcataggtacggatctcttgggaagccgtgggctaagcattgccgctgtgcaggctttgggccatgctgcccttggtccttggggtatgttctcaccgttgttcttgcattctttcatgccaagacctgtcccagcctttctgcttgtcttcacagttctcactcccaaggcccaagccaaatttcacactcactcagagcttttccttcccttcccaccgcttgaaggtggcaccctcctctaggtctcaggatcatcactaaatatctcctgcacttggcattcaaacctgattatggaggttggcagaatttgccaccaaaatacgccactttggcttaaggtttattttgagctgaaggcacttgagaagaagcagatacaagagaagctctctgtcctccccctatttgcctacaagcaggaaataaatttgccaaggagtcccaccgccccctctaccaagaatgatagaagttaatcaatggaggccaggtgcggtggctcacacctgtaatcccagcactttgggaggccaaggctggtggatcacctgaggtcaggagtttgagaccagcttggccaaggtgaaaccctgtctctactaaaaatacaaacaaatcagccaggcgtgatggcatgtgcctataatcccagctactcaggaggctgaatcaggagaatcacttgaacctgggaggtggaggttgcagtgagctgagattgtgtcactgaactccagcctgggcaacagagagagactctaactcaaaaaaaaaaaaaaaaaaaaaaaagaattaatggagacagcttcagccccttatcagcccagaggaaggggaggaatctacacaatgcaccttactgaagctcacctcatcctgctgtaaagcaaaaataaaatcctaagcccccgaacaaattgaatgaaccccccctctgctaggggcattccaaagtaaaccggaaaaatgagttcaggccatgacgggaaggaggctgggggacaggcctcattatacccccctccctttgggattcaggcacagctgaccagcattaacatcaacacagagaacctaagactgaccaaacagaatgtttgtagcaacatgatacaacacatgacagatagcaggccctgaaagaaatcgcagtattttaccccaaaatatgtttctttgacatagtttgaaatagtcctgcaaagctgtctcttgtaggggaaatctgcattctgtagagaatccccttctctttcctggtcttttcctattttgttagagacacagtttcactctgtcacccaggctagagtacagtggcatgatctcggctcactgcaacctccacctcccaggttcaagcgattctcctgcctcagccacgcaagtagctgggactacaggtgtgcgctaccacgctcggctgatttttgtatttttagcagggatggggtttcaccatgttggccaggctggtctcaaactcctggcctcaagtgatccacccacctcggcctcccaaggtgctgggattacaggcatgagccaccgcacccggctttcctctatttaatctgtctctcatcagtctaatttacaggagccccagccagggaacctaagatggatagatggaaaaataatttttttcctctgctgtaattgtcagtactattatttctctgcttccttgagagcaggggccatgtctcctgtctctctgtatcctttgcagctaggtggggcctctgcagagtagctgcttaaagtcattttgttcagtgttggctgagagaggggagcgttcctgttagccttctggaggtgtcaaggccagtgcctgccagtactgtgggatattcctggaaagattcaggtgctaagactctgagttcctggggtcatgaggaccctagcgaagctgttcatttgccccaaacttcctgagccttatgaacatgcaacctacaaccagaacggcctacctaatttgcagagcccagtgcaaaatggaaatgcgggaactcctgttcaaaaattactaagaattggctggcgcagtggctcatgcctgtaatgccagcactttgggaggctgaggcaggcggatcatgaggtcaggagttcgagaccagcctggccaatatggtgaaaccccgtctgtactaaaaatacaaaaattagctgggtgtggtggtgggtgcctgtggtcccagctacttgggaggctaaggcagaagaactgcttgaacctgggaggcggaggttgcagtgagccaagatcgcgccactgcactccaacctggtgacagaactagactccgtctcaaaaaaaaaaaaaaaaaaagaaaaagaaaattactaagaattttgagatggtgaagttgagatggtaaacggagcctgccccaccacccccaaccagcgtggagcccagtgtgactgcgcaggtcacttgtgcacgaagccagccctgcccacattggctttaccagcatcgggccctgaacaccttggctaggcagctcaggccagcccatcctgcagcagagctggccgccaggggcggtcccctccgcccaccatggtgcatggtacctgggtggcctgcatgagctgctgccagtggcgttcccgaatggcagggttctgcagctcgctcacggcacgcagggacgtgatcacgtttttcacggtgttgtcgagccccacgaaggcatcccaggttttcatctccttgtccaaagacctcatgtccttggcaaacttcttacaatctatgtccatctgctcaacgttgatatctttccacttggtggtcttccagtcctcgatgctggtatttacctgaaacgaaaacatcccgtttctccttccactctcatcaaggagaattcaggaagaaaaccctcttacctttctgcacttactcgcagggagcaaagcccagtgaggaatatttagaactaatacccgagatcagtaaagtgattagatacaagaaaaaacaaccgtggcgtcacaaaaggtaagatttaaaagttaacagttggccgggcacggtggcccacgtctataaccccactactttgggaggccgaggtgagcagattacctgaggtcaggagttcgagaccagcctgaccaacatggtgaaaccccgtctgtactaaaaatacaaaaattagctgggtgtggtggtgcacacctgtaatcccagctacttgggaggctgagacaggagaatcacttgatcctgggagacaagggctgcagtgagccgagatcatgccactgcacttcggcctgggtgacagagtgagactccatctcaaaaaaaataaataaaaataaaagttagcagttaaaaggcattttagcaaaaggctgtgttagggccctgctgttgctggccaggacccagttttctctcacttctcagtatgtccatgtagcttgtcttggccaaggaaaggtgagtgatgcctgacaatacccagcttggcattccccttgcctgccttggcaatcacaaaggggcatcgccgaaatacagcctgcactgtggaaccagtccttggcaggtagcttcccaggaaacaactgcttggaactacagcatgcactttgcatgaatgagaaatacacttttgttcagtacacagagatgtgtggggttgttaccgcacagtaacgcagcttccactgactggtaaaaagacaacagaagaaacttcactcacaacaatatgaaacaaaatatacaaactacccaggaataaccccaccaacagtataaacatgaaaatggctgtgaagctggaaactgctagtcattgagggaatgagagattgttgacatgggcacttacagtgagaagatctggacttgagaaacatctgagcttgagaacgtaaaaactgggagtgttcacaagatgtttgccttgaagatacgatgatttgaaaccttaatctacacaggagttgatggctttttctggcaggttcgagattaccctgcatcctattatcataaaatgtcttggctagtgtgttttggagagtttttcttgaattatcctgactgcaaatgctgtcatctcctgggaaatgtggactttattctcctgtctacacaaacaattttttgtcatgggaaagcgtatatcccattctctcagatgcctgctatgttctgtaatgccactcatgtaaaagaaacttgaggccgggtgcggcggctcacgcctgcaatcccagcactttgggaggccgaggcgggtggatcacctgaggtcaggagttcgataccagcctgaccaacatggtgaaaccccatctctactaaaaaaaatacaaaaattagccgggcgtgatggcaggtgcctgtaatcccagctactggggaggctgaggcaggagaatcgcttgaacctgggaggcagaggttgcagcgagtggacatcacatcactgcactccagcctgggccacagagcaagactccatctcagaaaaaaaaaaaaaaaaaaaaagagagagagacagactcaaaatcagttaattgttgaaaaagtatcaagaggccttcaatttgtaccttctgttaaggcctggctgtaataaagcctgtgtctccaaacatgtttctccccctgtgtaagaaatatgtagacttggtatggtcagcatgaagacatttactataatgtattttaaaaattaaataaaagaagagacagagcacgctcttgtatgggaacatggaatactgccaagagattaattttcctcaaatgagttaattcaattccatttaaagtcataatagcttccttttggaggggaggaagatttgacaaatgattcttttgtttttgagacagagtctcactcactctgtcgcccaggctggagtacagtgacgtgatctcagctcactgcaacctccacctcctgggttcaagtgatcctcctgcctcagcctccccagtagctgggactacaggcacatgtcaacctcacccagctaatttttatatttttagtagagatggggttttgccatgttggccagaccggtctcaaactcccggcctcaagtgatccgcccaccttggcctcccaaagtgctgggattacaggcgtgagccaccgcaccaggccggatttgaaaaaagttcattcaaaaaagtaaaagaggaaagagttcaactatttttgaaaacagatgagtgacgaggagacagaaaggcagaaaccaacatatgcacacacacagaagaagaaatacttgggaaaaagaggccctgtgcttggagtccagcctcccttcacacactgagacttggcctgtccttatctttctgctgcctaggaggccacatggcagcctacagagacatgatccagactgccctcgtttggcaaattcccaggctcccgaattgcctcctcttctccctgaatatcaccctctccacaacctacccaaattcccatttcctcagggctgtcttagcatctgacccaaacaaaaagcctgctggcattctttaaaaagttgtcagttctttcagttctgccaagatggagcagccctgttacttccagcttctctctcttacaactgaaaaaccttggacatatcacaacaaacaagaccatggaagattactcatatattgaggaaatacataagacagttatgttatagttaagaggggcagaggtgagggcaaagagatctaaatggaagtgaggtttctacacacaaaagtgacaaaatgttgatatcagtgactgtcaaacagccactaagaaaactatataaagcgctatgttcagaatcactctaaataaatcaggatggatcctaaaaatgttaaaataaaagagagtcagaggaataagaaacaaagggaacaaacagaaaacaaaatggcagacataggctgtaacatgacaataattaccttaaatgcaaaatggtctaaacagatcaattaaaagccagagactggcagagtggacgaaaaaacatgacccaatcatatgctgtatataagaaactcagttcaaacacaaaaatataggtagcttgaaaatttaaaaatggagaaagatcaggacgaacactagtcaaaaacaatagaaaaaacagaagtagctatactagtatcagatcaagccaaccttagagcaaagaaaattcctagagacaaaaggaacattacataatgggaaaaagggtcaacctataagaagacaataatcccaaatctgtacacaccaagcaacagagcctcaaaatacacaaagcaaaaactgatggagctgaaaggagaaataaacacatctataattatagttggagagatttcagcaccccactctcagcagtttatggaactgctagacagaaaattagcaagactataaaaggacagaacaacacaaccaactgacaggatctaattgacacgtataaaacactccgcccaacagaagcagaatacgcattctgttcaagtgcccatgggacattcccccagacagactatatcctgatccataaaataaagcttaatacatttaaaataatgaaagttatatacagtgtgttctttgaccataatggaatcaaactagaaatcaataatagaaaggaaacaggaaaatctctaaacgcttagaaatttaaaatacaggccaggcgtggtggctcacgcctgtaatcccagcactttgggaagccgaagtgggctgatcacaaggtcaggagatcgagaccattctggctaacatggtgaaaccccgtctctactaaaaatacaaaaaattagccgggcgtggtggcgggcacctgtagtcccagatactcgggaggctgaggcaggagaatggcgtgaacccaggaggtggagcttacagtgagccaagatagcgccactgcagtctggcctgggtgaaagagcgagactccgtctcaaaaaaaaaaaaaaaaaaaaaaaaaagaaatgtaaaatatacttctaaatcatccatgggtcaaagaggaagcctcaaaagaaattaaaaaacacacagaactgaatgtaatatcaaaatacgtgggacgcagctaatgtagagagggaaattttatagcacgaagtgtttcctttagaaaagagaaaaggtctcaaatcaataatccaagtttctacctcaataaactagaaaatgagcaagataaacccaaagcaaaggaaggaacaaaataataaagaccagaaactgatgaagtttaaaataaaacagcacaaaagttaaacaaaaatctttttctttgaaaaatcaataaagtttataaacctctattatgaccgacaaagatgaagagtgaagacataagtcaccaacactaggaatgaaatagaagataccactgctgagcttgcagccatctagaggatagtatggaactagtataaacaactttatgcttgcttgaattaaacaatttagaagaaataaaccaattcctcaaaaaccacaagctaccaaaattcactaccaagattttcacaaatttgaaacagaccaacgtgaacaagcctgtatggccattaaagaaattgaatttgtaactaaaaatctcatggaaatggccgggcatggtggctcacgcctgtaatcccagcactttgggaggctgaggtgggtggatcacctgcggtcaggagtttgagaccagcctgaccaacatagtgaaaccctgtctctattaaaaatacaaaaaattagctgggtgtggtggtgggcacctgtaatcccagctactcaggaggctgaggtgggagaatcgcttgaacccaggaggcagaggttgcagtgagccaaaatcacaccactgcactccaggcctgggcgatagaacgaaactctgtttcaagaaaaaaaaagtcagtgtaatcaattatcttagcagactaaacaaaaatcaatcatatcagtaaacacaaaaaaatttgacaagatctaacacctgttcatgatgaataaaaagaaaaggaatagaatttcctcaatttgaaaacttacagctaatatacataatggcaaagtggttttcctcttagattgggaacaatgcaaggatgtgtgaactcaccactcttattcaacagagtactggaagttcaggccactgcaataaggcaagaaagagaagtaaaagacatacagaatggaaaggaaaaataaaactgttcctatttgcagatgacattattgtctatgtacaaaatccctaaggagtctaaaaaagccatcctagaactagtaagtgagtttagcaaggccacaagagaaaaacaaacacataaaaattattcacatttgtatatacccaaacaaacatgtgcaaaccaaaatttaagatgcaacgccacttattaatacaatcacttctaaaaagaaaaggaaagacacatgaggtataaatgtaacaaaacatgtataggatcttaaatgctataacaaaatgaaatcacaaaaaaatcaaagaagagccaaataaatggagagatacattatgttatggactgggagacagagtcaacatgtcagttctctccaaattgattaatagttttaacgcaattcctataaaaaccccaataaggttttatttttttataagcataacaagcttattctaaaatttatatggaaaagtacaagtcctagaagagcaaaccaatcttgacaaaaaaggataaagtgggaggaatcgctctgataacaaaccttactagattgctctaggaatcaagactgtgcagtatcatggagggacagacacgaagaccaatggaacagagcacagaacccatcaacagcagcagtctaaggtgcccaactgacttttgataaagatgcaaaataaattaaatggagcggggccaggcgctgtggctcacgcctgtaatcccagtactttgggaggctgaggcaggtggatcgcttgaggtcatgagttcaagaccagcctggccaacatggcgaaaccccatctctactgaaaatacaaaaattagctgggtggagtggtgtgtgtctgtaatcccagctactcaggaggctgaggcaggagaatcgcttgaaccggggaggtggaggttgcagtgagccaagatcgcaccacagcactccagcctgggtgacaagagcgacactccatctcaaagaaaaaaagaattttttttaatggagggaccgacttgtctacaaacatgctggagcaattagacatccataaacaaacaaaaataataaatgaaccttaacccaataaacctcactccttatacaaaaattaactcaaaatggctcatagacaaacagaaagcagaaaactataaaagcataggagaaaatctttaggatctaggaaaagagttcataatctatgaaaggaaaaattgataaaatggattatacccaagtttcatattaaaaactttaaagattatactaaaactggccgggcatggtggctcacacctgtaatcctagcactttgggaggccaaggcgggcgcattgcctgagcttaggaattagagaccagcctggtcaacatgatgaaaccccatctctcctaaaaatacaaaaattagccaagtgtggtggcgtgcgcctgtaatcccagctgctcgggaggctgaggcgagagaatccttgaacccaggagacagaggttgcagtgagttgagatcgtgccactgtactccagcctgggcgacagagtgagactccgcctcaaaaccaaaattatactaaaactcttgctcagcgaaataccctgttaagagaatgaaaagacaagttacagactaggagaaattactcgcaatcacaacctgacaaatagctagattctagaacatataaagaacgctcaaaatttaacagtaaaaaacttagttttggttgccgggcaggaggaaggtgctggctgcagagggaaggagctcccagtggctgtggagaacccagcccagctgagccgagccacggccaccatggcggctaccgaggacgctcacgagaaccacagtacctccactgagaatgcagacaagtccaaccaggaccctcagtatgagccaatagtttctactcctgagcaagaaattaaaatgctagaggaagaggaagagggactttttaatatgtgagtgcaactattctgatttgtttcagggaacaatcttctggaatggaagggtggaggcactggcaacatcaagctcctgaagcacaaggagaaaggggcctcacgaggagggacaagaccctgaagatctgccagcccctaagtcacacccatgttggagctgaagcccaacgcaggcagccactgggcctgggtctgcaacacccacgccgacttcacccatgagtgcccaggccagagctgctggccggctgcttcctgaatgctgagcatgcacggaaattccaaagttcagagaatgcaaaaaagacatcaaagagagacaaaagaaaggaccaggcaaaaacaataatgccgaaaaagtggtggaaaagctagaagctcttttggtaaagaggagaccaaggaagacactgaggaaaagcattaaattcttcctttctttcctttttctttcttttttttttttgagatgtggtttcactcttatagcccaggctggagtgcagtggctccatcatagctcactgtagcctccacctcctgggctcaagtgatcctctcacctcagcctcctgagtagctgggatcacaagtgcacaccaccacgcccagctaattttttgtatttttagtagaaacaggggtcttgctatgttgcctagtctggtcttgaactcctgaactcaagtgatccacctgcctcggcctcccaaagtgctgggattataggcatgagccactacacctagcctcctttttctatttatttgagatggagtctcactctgtcccccaggctggagtgtgatggcgagatcttggctcactgcaacctccgcctcccgagtagctgagattacaggcacctgccaccatgcccaactaatttttgtatttttagtagagacggggtttcaccatgttggccaggctgctcttgaactcctggcttcaggtgatccacctgccttggcctcccaaagtgctgggattacaggcgtgagccaccccgcctggcctcctttttcaattttaccctgcctctccttttcagtttgtttttattgtattttatttttacaagggactgtatatgaataactggattaaaaaaacttaaaaaaagtcaattggaaaaaaaaagtcaactagaaaatggataaaagacatgaatatgcagttcaccaaggaggatatatagatgtcaaataagcccatgagaagatactggaggctgatgcctgtaataccagcactttagaaggctgagacggatggatcgcttgagcccagaagttcaagaccagcctgggcaacacagcaagattccatctctacatagaaatgtaaaaattagctagacgtagtggcgcaagcctgtagtcccagttacttgcgaggctgagaggcaggaggattgctcgagcccaggaggcagaggttgcagtcagctgagatcgtgccactgcaccccagcctgggcaacagagcaggaccttgtctcaaaaataaataaaaatactttttaaaaaagaaaatatgctggcatcgttagtcagtaggaaatacaaatgaaaccacaaaatctttctcatagattgagcctctgatggtctgaatattccccccaaaatttctctgttgaaatccttacctcgtattaggaggcagggcctttgggaggtgatgaggtcatcggggcgtggccctcaggaatgtgatttgtgctcttatttatgtgtttattttttgagatggagtctcactctatcgcccaggctggagtacagtggcacgatcttggctcactgcaacctctgcctcccaggttcaagcaattcttctacctcagcttcccgagtagctgggattacaggtgcacaccaccacgcccagttaattttcgtatttttcgtagagacggggtttcatcatgttggctaggctgttctcaaacttctgacctcaggtgatccacctgcctcggcctcccaaagtgctgagattacaggcatgagccaccacaccgggcctgattcatgctcttataaaagggaccctggagcgatttctcagccccggcctgctccacttccaccacatgaggatgcagtgagaggggactgtctatgagccacaaagtgcgtcctcaccagacattacatctgccttgactgtggacttcccagcctccagaacggtgaggaataaaatgttgtttatgagccactgagtttatgggattttgttagagcaccttgaacagactaagtggtattccttacttaaaaaaatttctttaaaaaaggtgagatgtgagagagaatgagaggaggaggaaaaagacgaagggaggggaaaaaagaaaggggggcagtcaaaggcgagcccccacccacatacagagagaggtgaacatatcctgctttagcggagggaccccacctcgcgatctcagggcccttcggatgcctccacccaacaccagaaaccttcttgtcacattcttacaaccaaagggtgcccagagcctgccctcttgttgccgggggcagctccctgcagaatcccgggccccacccacgcggcgtgccctgcactcaccacaacaaccatgtcccagagctccttcagtaggcggacctcccggtggcaggccttgagctgcttgtagtctgggacggggacctcgaacaggcccccggacttggacagcgcctccatgatgccttccatggcggagatgctcttttgttgctaggggcggcgagggggccgtcagtagggctacctaccctcagcggtgccccaccccactccccgacgttctgcccgtctctccagtgtgccctccctgataaaccttctgggaggaggtgtccatacaacggtgtcccacctggagggaggacagagccctccatcccccaaggcctcctgggtcctgcctgcaggggagggcgggtgacctctacccacaccagcgtggggactgactcccaatgggcatggtaaatgcctcatttcctcctgagagtttctgatttcccagcatttcttcaactttcatattatatttttatcttattaaaaatgacttaagtaatgctttgaaaatgagataattcagataagcaaagaggaaaaatccgtagtgtcctctcaaatcccatgactaagagttggccgtcgtagcacctggtgatagtgggtgtgtttgcgtggacacgtaacaggcaggctgtggcaaaggtgggctcggagcgtgtgcacacacatggacacgcagggactgcctgctctggtcaccagctggagctccacagctccccttggatgggcatggggcacccctcaccccaaatctttccagaaaatccagcccggggccctagggagagaatggctgcatctccatcgtggcttgaggaatgcgacatgaggaaacggccatgaggaaaggtcggattggagctggaggccaaagagccgaagctcagggaggggaagagtgaggcaaccctgaggaccctggggttcacatttgctagagcctgtgaggcggaggtgcaggtggggccgacccagcagtacctgggcaccgtactgggagcaaagaggaactgacaagggccccactgggccccaagaggcccccctgggccctgagcaccccacatgctcctgcccacaagggccttttgggcctgagcttgagtgggctgccaggtccagggctgtgtgaatttgtgcactggacgtgaccatgaacttggacagtgggaacagagtgggaacacgagtgaagcctggctgctgcccgatgtggtgggtcaggagaggcaggaggcagggagagatggcaggtgagtattaagcccaggggacaggaagctgctgaatgtgaacagagtggagattagggggcggagtcaggctaagggactatgggtcacacagggtgttaaggggcctgagccgtgggcctggagccatgctctgagctgcgagacacagaggggacaccatgtggtctggggggctgctcggtttgcatgttcacgtacacacccatgcatgtgctcgcacacgtatgtgcatgcatacacataagagcactcgtgcacggccccaaggtcagtccggcggagaccacgtttctggacttgaaaggataactacttgagaaaagaaagcagtggggttcccagacttaccccctgatctcacccttgagcaaaaataccttattcagggacttgtaggggttggggtcgctgaaggagaacggggcctcgcgcctgaacctctccctgaactcatgttgcttgagctgcgagagaagagtgcaaagtacagagagtcacggggcggccacctgccccaagggtggccccaccctgtatgccgcagggccctgggtgagccccacgctgctccccggaaatcccgccaccctgccccaggtataatacctcgaattgctggcatttccgccgcaggatgctgacctcgttggcctggagtggtgccacggtcagcttcacctgaatggccagtttcttggtatttgcccagtgctccggcagctcctgcgggaagcaaaggcagaggagggctcctttctcatttcttttcttaaaccttctattgtgaaataattagagactggtaagaagctgcaaaaacagtgcaggggccggcgcggtggctcacacctgtaatctcagcactttgggaggctgagatggaaggatcacttgagcccaggagttcgagaccagcctgggcaacaaagtgagaccccatctctacaaaaaatacaaattctttttagctgggcgtgatgatatgggcctgtagtcccagctactcaggaggctgagctgggatgatcacttggactaggaaggcagaggctactgtgagcaagattgtaccactgcactccagcctgggtgacagagtgggaccctgtctcaaaaaaacaaaaacaaaaaccagcctccttaatggcgaactaggacattgacattggtgtctctgttaactagaccagagaatgtactcacctttcatcatgtttttaaacctgaatccatttgtgggtgtgggtgtgggtgtggtctcccatgcaattttatcccacgtatggatttgtgcaaacaccgccacaatcaagatatggattgtccattacaacagaggaattccctttctatccctccaccacaatcctgcccctggggaccgctaagctcttctccagctctataatgttgtcatttccagaatggctgcaacaatcagatgaattttggtatttcccaagttccccacacttgggtaaatactatagttgtaaatatttaattattatttattcatttttgagacagagtctcactctactgctgaggctggagtgcagtggtgcgatcttggctcaccacaaccgctgccttctgggttcaagtgattctcatgcctcaacctcccgagcagctaggattacaggcgcctgccaccacgcctggctaatttttaaatttttagtagagatgggattttgccatgttgcccagactggtcttgaactccttggctcaagtaatctgcccgcctcggcctcccaaagtgctgaaattacaggcatgagccaccacaccgggccataaaatattttaaagaaaaaaaaaatcccagcccatgaactttttgcctgcagtggagacttctctagttcttctatggttgctggctgtatggtttctgtctgcatttttactaccccagttgcctcgtgtgtggcttggagcacctcagggtgggacggctgagaacctgctcagtccttttattttctttcttttgacacagggtcttggctctgtcacccaggctagagtccagtggtacaatcatacatcactgcagccttgacttcctgggctcaactgatcctcccacctcctgagcagctgggactacaggtgtgcgccaccatgcctggctaattttttaaattttttgtagagacagggttttcctgtgctgcccaggccggggcccctccctcttgtcacccccagggctgtggggtcttgggcactgtctggagtcggtgcataagacaggagggtgggccctgtctgtggctggacacagagaaggggagagggcgggaggaggggtggacgggctgggaggagttggaaactccaggccagactcaagagatgagggagcggggtctcctcggtggccacacctagacgtggctgggaggcagctctaggacacaccctctccatcctcccaccctcgcccagcctgcacacacccctccacgctgacagctgaggttctttgaattcgctatcaagtgctgtgcaaacgcagctgccagccccgcccccttcagctgcctaatccctccccagggtccccctgaccttgttctctctccaccatcctggcacccacctccaccagcactcccaccagacactcaggaggagacatgggacataaaggcattttgtatttttttttttttttaagacagaatctctgtcgcccaggctggagtgcagtggtgcgatctcagctcactgcaacatctgcctccctggttcaagcaattctcctgcctcagcctcctgagtagctgagactacactagccagccacagctggctaattttctatatttttgtagagatgggctttctcccacgttgctcaggctggtctcaaactcgagctcaggcaatctgcccaccttggcctcccaaagtgctgggattacaatgaagacatttttaatccaacaaaacaccaatggaacggagggagcactggcctcaccgtggaggcagtccccagggtctcctgtcccccagaaacctcctccctgcacctccctgttccatggggatctgatgtccagagaggatctagcccacagcatcccccatggttgcgtttgatgggctggtccatggtcgcggccgggatggctctccctgctcacctggacgcagccacacccacccaccacgtacctgcagcttcaagtggatctcctctggcatctcctccccgtaggtcttgagcagctcgatggtttgcttcaggggctcaaacatgttgtcggtggctgcttgcctctccttgactttcatcaggtgccccatcacctccacaagcccatcatagtccccctccttgaggggcttggtcaagcccattctggcgactttcatgaaggcttccaggtcagccaggctaagggacaaggggaccatttgtgtggccccagccccccttaggcccacccttgatggtacggagccccatgagagggggacgaccgcggtgaggtcaactggccatcactgaaggccccaggtggggagggagcgcccctgcccaccttggatccctccagctcactcagcccctgcccagacatcaccccaagcctcagcaacttagctcaagcccatcctcaagtcccaagctacggccacatcccagaggccttcactagcctcccggatggaattcagccaggcaatgctctctcctggcactgtgcccatcatggccctgatggccgcctataatcccacagctgccagtctgtttgttcagcgccagccttccctgacagacttctggtttcctccgcatctggcacccggacagagcaggtgctcggtacaccgggtttggagaagggataatgtttgctcgcagcccggtgacacctttctgctcacgcttggtggggtagttggccttgaagcccagcctccaccccctgctaccccagaggaggcacctgacaaatgccacccactcaagtggaaggccactccctggtgctctgcacattccttgggctccccgagtacatggctggggacccacctgttggtgacgtggttgctcaggtgccgcttgaacatgaagccccagcgccggattgtgctgagcagggcctgcttgaaggggcggcagtcgcactgcagccagccgtggaacaccttggtgttctcgcacttggacacctcctcatacagcttctcgtaggagtcgatctggaaaacacggccaccggcggcctgtcatagcctgcaagcctagggggggcgtcagcacagggcctcagtccagggccttcctgcactgcacctgcgctgctcacctgccggccactctggggccagggtcagcaaagggcagtacgggacacatgggggccctcattccaagttattgttccttccagccccagagtctagccccagaaggtgccagtccatcagaaaggggcagaaggggtcatggcagcaggacttctgaagctgggtaggacagaagcttcaagaggtgaaccaggtcacaggctcctaaagggcatccctagctcatccttctacctgaggcctctgtcactcctcctgctgccccaaccctgtgctacagaatgtacccctgggcatgggtcacccttgcccacggggccctctttctcactgtgcattgggaacagagctagaggtttgtgcgttaactatgttttcttattttatgcattctttctgcagctgttgggtaaagtgttctgtagctgtctgttggtccctgtgatctaaagtgcagtttaactccaatgtttctttgctgattttctgtctagatgatctgtctgacgctgagagcagggtgttgaaaaccctaactgttactgtactggggtctctccctttagatctaccactgtttgctttatatatctgggtgctctggtgctgggcgcatagatatgtagaattgttaaatcctctcgctgagttgatccttttgtcattacatagtgaccttcttggtctcgttttactgtttgtgacataaagtctgtcttttttttttttttttttttgagatggagtcttgctctgtcaccaggctggagtgcagtggcgtgatcttgactcactgcaagctccgcctcctgggttcacaccattctcttgcctcagcctcccgagtagctggaactacaggcgcctgccaccacgcccagctaattttttgtattttcagtacagatggggtttcaccgtgttagccaggatggtctcgatctcctgacctcacgatccaaccgcctcggcctcccaaagtgctggtatcacaggcgtgagccaccacgcccggccgacataaagtctgtcttatctgatgtaactatagttattcctacttgttcttggtttctgtttgtgtggaatctctttttctattcttttgcattcaatctgtctttacaggtgaagtgagtttcttctaagcagcatatattggggttaccttcatccattcagacaatctatatcttttaagtggggaattgaatccatttacatttgaggttattacactgacaggtgtgattttctgtgttcttcatgctctgacatctggggccttgcccatggacgacccctcccaggcctagtcaattttgagagacaacaaacaattcacctgggggtgtggtttcatatgcaaatgagccaacccggagcccacacctccgaccatccccttgatggggctctcacagggttttaccttctgggctgctacccactagccctcagccctcatctccctgaggtcaggtaccagacagcccctatagcctagagcctgctgaaattattcaaacttgccaaccctaagcctgtgacctctgcccattccttccctggaagccacaataaaggctctttattttccccacattttccccagctccctctgcctcctgactgaccctgatgctaccccgtgcaggcctgtgtggtgtgctatgcccccttcttgggaactgtaagtaacaaactgcctttctaatggtggtcacctcctgatgtttgccttgccctacctggaaacctgcatcttaaaacaattcacccaagttttaaagcaagcctggtgatcctctcctggaagactctggagacaaggaggctggtgggtgaggtctgcacgcacctgctcctggaactgagccagggtgggcggtgtcttggggatggtgtcatctgtccaggtgtccaagtcctccgcagtgactgcacacccatatatcaggaaattcttcataaactcctgcaggttgtccgtccagaggtaggagtacctctcaaaggaatcctggtactcctcggcctccttcatggcattgatgaccaggctggacacctcctccctcatctctatgaggtctgtgttatcttccaggtccatctgaaaggggcaggggagaagcaaaaaggggaggtatgttgcctggttcataatttaggtgttgtcctctcggccttgagaagtggttctctgttggcgaaagggcttccaatctctcatgatgacctgctctttttccagcctgggccgatcacccctctttaggcaacctggtggtcccccactcctgggaggtcaccatactgatgccaaacttagtggatagcacactacagcccagaactcctgggctcaagcgatcctcctgcctcagcctcccaagtagctgggaccacaggcacgtgccactgtgcctggcccaagctctcaccacgggaaataggaacctttgccgatttgcaatattctgccatgggaaggtatgccaagtgtgacgtttgtctggggaaccccgagatgactcacacattgattcattcattcgatagctcgctctcactgcgtaccacatgctgggatagatactggggcacaggcagggagtgtacagcccaggaatggggtctgacattcatcaaagaatcacagaaaaaagcatctccaccctcccccttgcttcaggtgaaatggggagcaggtcagggaatggccccgaggaaatggccattggtctgagagctgatggatgggtagacaaggagcaagagaagcggctttcctggcaacagcaaagcacgtgcaaaggccccgtggtgggaggaggcagcgtgttaggggaactaaaggaagtctactgtcggtggctagagcagagagcacgagaggccagtgctatacggatctttttagttgccagtgacagaaaacccaacccaaactggttaagcaaagagagaactcgttggcttatatacaggactggagaatcccaaggtggtcggtgtgtgtattaatcacatttttattgtctgcatcttatgaaattttgacatcttatttctttttgagacagagtttcggtctgtcacccaggccggagtgcagtggcccgatctcagctcactacaccctctgcctcccaggttcaagtgattctcctgcctcagcctcccaaatagctgggattacaggctcccaccaccatgcctggctaattttttgcatttttattagaggcggggtttcaccgtgttggtcaggctggtctcaaactcctgacctcaggtgatccacctgcctcagcctcccaaagtgttgggattacaggcgtgagccaatgcgcccagcccaattttgacatcttaaaaaaataaaataaaaaaaccttatgggccaggaagagccggcctttcccagggctaggcaattctttgagatagcaaaaggctcatctgggggcatgcatatgcaaaccagccgaccctcaaccactcccctttacccaactctcacaccaagccagtatttcccctgccctaaatcacccagggtcaggtaccagacaactgaagacagcctatagcccagagcccacatgacagctgcagagaggccccatcgggacccagatgtgcatggagatcttgtctgtgcaggggacctcgttggtaaggggtggcacgaggaaacggtgtaattgaggaggtgaagtcagtggggctgggatggaaggggaaggttggccctagggctgggccgggccaccctgcatgtaagttgtggatggaaagaagccacaggggagagaaacctgaagctcctcgtggctgcaggaaagcatttggtgtgtgcttcagaattcagccatgggctcgcctgtgcctgacatttggctcccacccctcctcatggcccctctttctgctcagggttgggagtgcagtgttcagagcacaggcaggtgcttctggatttcagtgttgtaacttccaggcatctacctgctccagctgagattgtcccctgcagtcctttggatctccccaggtgggatccaagttccagttgggctgggctggtggcagcctggcataccagaggcaggtgagacctgctgcctggggtctctgccccttgctggtgtcccctgtgggcagctcagctctctaaatccctgtggcagcctggggcccacattctatctcctccttgtcctgacccaactcctctgggttggccaccctggtacccatgggaagcatcccttgggtactctctgccaccaagctagggtacttgggtctctgggaagtggccctgggacccagcagtctagatgcctgactctctcattgtcttccacagcttggcaccaggtaagactctgctagaccagcaggctttcgagggacccttctcctgggcaacaggcccttcagctctggaatgttctgcctgagcgtcccagggtgtctgcaaggcagcctgagtgtttgtgctggcagagcccaggggtggagcagctctgtctgcagcaaccgtgggtgcccaagagcagcctgctttggggacagtgggaggggcacacccgggacacactgattctgaggacatgtgctaacctagcgtctgcataactggggcaaattctattctcaactctggaacagcttgctgcttgcacttgggcctaaaatcacagccatcttctcagcatggaaacctcctcccacccttccagaatccgctcacacgcccactcctctcaggagctgtccttgaccttctcaggtcattagctgttccctcgtgtcctcatgtcacctctgtacaagcatgcctccccaccacacatgcaaatacgcacacgggcacatatgcatccaagcacacgcgtacacacacgagcacacgcacatccctccctcctggacaggacagctcatctcgctgtaaatatatgttatgacaaatcatacgtgtccattattttacaattcaaacaacgcagaaatgcatgagaggaaacgcctgcagccacatccctctcccctcccctccttcctcccttcctggtaagcactcacccagatttttgcttgtttaagcaaatgaaaccatattctaaacattgttctgtaacttgataaatgtctaataacctgtcacaacacctttccatccttggctcattgtgacaattcacagaatctgggtttgggccagaattggtcaagccactcccctcttccacaaacatttaggtcacttaagtcttttcagatttttttttattgctatacaaataggtgctttgacaaacacaccacctcaaacctcccttaagcggggagctgaatttcccatgacttttgttgtccttcctaccccagagcctggccaggctctccgtgtgtcttgtttgatgcgtttagacgagatgatttcagaaggcagtgggaggcacatttgtcaaattgcctgagtactgggagaatcagtgtttacattacaggactgaggccgggcacggtggctcacacctgtaatcccagcactttgggaggccaaggcgggtggatcacaaggtcgggagattgagaccatcctggccaacatggtgaaaccccgtctctactaaaaatatataaaaaaaaagaaaaattagccaggcatggtggcatgcacctgtagtcccagctactcaggaggctgaggcaggagaatcgcttgaacccaggaggcggaggttgcagtcagctgagattatgctactgcactccagcctgggcaacagagcaagactctgtctcaaaaaataaaaaaattaagaagtttaagaccactctgggcaacaacatggcaaaaccccatctctacaaaaaaatacatcaccaagctgggcttggtgatgcatgctcgtaatcccagctacttgggagactgaggcgggaggatcaattgggcccgggaggcagaggctgcagtcagccgagattgaaccactgcactccagcctgggtgacagagtgagaccttgtctcaaaaaaattacaggactgagtgaacagtcaggaagttgggaaaggttaccctcttggcatcgtgtcggggggttggaaggatgatgagggaatgaaacccaggcaggttgactgagaagaagctgctttgggaaggacgacagatgtgggagtggggagagaagtggccatgtcatcctagaggtcacacgatgtcatttaaaaggtaagcagggccgggcgcggtggctcacgcctataatcccagcactttgggaggccgaggcgggtggatcatgagttcaggagatccagaccatcctggctaacacggttaaacccagtctctactaaaaaaaaataaaaaaattagccgggtgtggtggcgggtgcctgtaatcccagctactcgggacgctgaggcaggagaatggcttgaacccaggaggcggaggttgcagtgagccaagatcgcgccactgcactccagcctgggcgacagagtgagattccgtctcaaaaaaaaaaaaagaaaaaaagaaaaggtaaacggcgaagccttgccgagttagggcggcaacaccaaatggggaaagcaatggatgaccctgtgtacggccagaagaggccaggactgaccttgtagttcatcctgtccttggccagccgagggatgagcctggctacgttgtagatgtcgttgaccaggccctcgatcagtgccaggaagccgcgatctgagcccacctccagggtcgggttgaaggtcagcccatcctcgtccagctccatgcggatctcaaacaggggagcgatactctcctgaaagaggggtggggttggcagtggtcaacacctctgtcctccatcggatgattctcagtgccctgatcatccactccgtaccatcaatgtgtcactgccttccacttatctgggaagcttctgagagctcgtgtctcagcgcaccccgctccttgagcaatcgctacagagccaaatgtacagccacaaggccaaaagcaggcaggggcaggttggggcaaggggaggggcaggatcaggtagaactcagacctcggttcaaagcccacacctgctacttgccagctctgaggccttggggagtcacttaactcccagtttccccaaatatataaaatgaggctaaatattttatagaatggagacattgttggctaggcgcagtggctcatgcctgtaatcccagcactttgggaggccaaggcgggtggatcacctgaggtcaggagtttgagaccagcctggcccacatggcgaagccccgtctctactaaaaatacaaaataattagctgggcctggtggtgggtgtctggaaccccagctactcgggaggctgaggcaggaaatcgcttgaacccaagaggcggaggttgcaatgagctgagattgtgccattgcactccagcctgggcaagagcaaaactctgtctccaaaaaaaaaaaaaaaaaaaaaaaaagaatggagacattgtttccattgttctgggttactacaggggctaaatgaatcactgacacacaaagcaggtactgcaggggctggccaagcctgcctgtccctctcccttggaagtccccgtttacagagttctggaggcccctgtgaggctgcagggctgcaggtgctgctctggtttacagtgatgggattgagaacccaagtgctcttcctgccaaactaacgattctcaaaatgtgggccaggatccaccaggctgtgagatcacactgtggccactgatctccccctgaatgagtccccattggacctgtgggttatgagcttttgagccccccaatttgtctatgagcaggagggggctgtatcagtatctgagtgaggtgctaattgggacaaacggtcaattgtgtgaccagacttctctaaagactcaggtcggctcctgcccccaggctactcacaaagtaggaggactccctggaactctttgaggagaaccctttgttactgggacttctttatggtttttgttgagacgctttcactgggacagtctgtagtgacgagtactttcgtcaactgaattttgggtctgtgactggttaccagctggcatctgagacccatatgccagactcaaacaccatccaccctccctggtcggtacaagggcacgacactgccacgttcctttgttgttggtagcctgggggagcctttgatcttggcctcctggcggtactcaaaatcatttagaaaccatctcaacaaaaaagatgcagggctgggcacagtggttcacgcctgtaatcccagcactttgggaggccgaggttggtcgatcatgaggtcaggaattcaagaccagcctggctaagatggtgaacccttgcctctactaaaaatacaaaaattagccaggcgtggtggcgggcacctataatcccagctacttgggaggctgaggtagagaactgcttgaacccaggaggtggagtttgcagtgagctgagatcatgctactgcactccagcctgggcaacagagcgggactctgtctcaaaaaaataaaaaaataaaataaaaagaagatacaggtaggaaaggggccattgccatggaaagcatgcctccatgggattaaccagcacaacctctttgctgactggtttaccttctactcagccgtatataatcaagtaggtgagtggctgttgttgctgacaggagaccctccccccaatccacatgagtagggggcagtggtgtccactttccttcacctggcagtgaggcaggaccagcctcttaggtctcttgaggttttctgcagccaatttatgttatggcagatttaaagtgaccagtggtcctgagtgcctgggactgaggggattctggaatgcaggacttccaggtttaaaaccaggtcaagtagattgcataagatatattttaataagtctatttataaaatgatagcctgttcatcaagaaactagaaactatagattctaacagataagaatacatatacataaatatattaccttatgttgataacttacatctataaccatgttgtccattaggaaactcagagatttgcgaatgaactggtcaaattcatctaagaccatgtcgtcaatgtagatgacataatccttccagggcaggctcagtgtgtctgccctgaatagttctgcgttttcctgcaaacagaagcgcacagttgggcctcacttcactggctgtgcttgctctttgatcacactgtttagtgcctctctggaccgcccgtccatgttcacacgccggacacacggggctgctttgagcatcttgctggtgctggccgccttcctactcgaggctttgcacggctgctccctcactttcttgctgggtctggcttccaatctttttgatttcagctcaaatgtcccttcctcccaaaggaatcctccatctctagttgggtttcctctagcaaactgttatttatgcctaccatggctcagagggccactcagaattattttatttgtctttgtctttggtctgcatgcccttttgatgcccaaattcatgaaggtgaaggttgaccatcctctccaccactgtacccccagcactcagcagtaggcctagcacagagcaggggctggtgggtgggtggggtgggtggatggacagatgaatggggtggacggatagctggatggatggatggggttggtagatgggtgagtgggtggatggatggatggatggatggatgggtgggtgggtgggtgggtatgtggatgtgtgagtgggtgggtggatgggtgggtgggtgactgggtgggtgggtgagtggatgggtggatgggtgggtgggtggccgagtggatggatgggtacgtggctggataagtggggtgggtgaatgaatagatgaatagagtgggtaggtgtgtgagtccatggatggatgaacggggtgggtagatgtatgagtagatggacagatggatgggtggatgggtggagagatgaatggggtgggcagatgtgtgagtagatgggtgagtgggtgggtgggtggggtgagtggatgggtgggtggggtgggtggatgggtgggtggggtgggtggatgagtggacagatgaatggggtgggtagatgtgtaagtaggtggatgggtgggtggatgggtgggtggatgggtggatggatgggtgggtgggtgggtgggtgggtggatgggtgggtgggtgggtgggtgggtggatcggtggatgagtggatgggtggatgggtgggtggcgtgggtgggtgagcggatgggtgggtgagcagatgggtgggtggcgtgggtgggtgagcggatgggtgggtggcgtgggtgggtgagcggatgggtgggtgagcggatgggtgggtgagcggggtgggggggtgagcggggtgggggggtgagcggggtgggggggtgagcggggtggggggatgagcagatgggtgggtgagcggggtgggggggtgagcggatgggtgggtgggggggtgagcggatgggtgggtgggggggtgagcagatgggtgggggggtggggggtaagcaagcagatgggtgggtggggtgggtgggtgagtgagtggatgggtgggtagggtgggtggatgagtggacagatgaatgtggtgggtagatgtgtaagtggatggatggatggatggatgggtggatggttggatggatggatgaatctctaggatactaagtgctatagggaaactcaaagattaatttcactcagtctataccctcaggcaggtctattctaataagggagagaagacttgggctcaaataacttcagcataagataaaaagaaatggctctaatgactgtcatgagagtagccatacgtggtgacagagttgtgcacaagagacaacaccatctcatcacagttggggaacagaataggctggcttgttgcctctgcccctcttaggctcctgtccctgctgcttggcttcaacctcagcccagtcctgcctcctcgcctgccctcttgctatgctcctgccctctgaaactttactaaccctaagtcaaatctctctcctgtgctctgtttccaacccttctgagagtgttaacaagctaatcagttaactcttccaagtaacatttttgcagtttagcattttaattcagagggagctactggcaccgtggcagggaggggagggatgggaactgggaatgaggcacaacagactctggttcagtcaagtcacttcctggggtgacgatctttagagcaatgatgtgacaataggaacagccaataatggcccatcccccgggtgtggcctgctggtctgtctagatgatgtgactcatcattaaagtccacaccactgatttgcaccacccactggaaaccgccccccccaaaaactgccctaaaatacttttttttttttttttttctgaggtggagtctcactcttgtcgcccaggctggaatgcagtggtgcaatcttggttcactgcaacctccgcctcccaggttcaagcaattctcctgcctcagcctcccaagtagctaggattacaggttcctaccactatacctggctaatttttgtatttttagtagagacagggtttcaccatgttggccaggctggtctcaaactcctgacgtcaagtgatccacccacctcggcctcccaaagtgctgggactaccagcgtgagccactacgcccagccgttatttgagctcaagggagaatattctcttttacaagccaatgcaaagctccacctttcacattctcctcagagacaaactaaaatgcaagctgggtgaaattactaccaagtgaggaggatatgaaaacccctacaatacaatgtcaggactccagacaaagcacccaggaatgccagtctactgttctgcattctcccactgaatgtgccaaccatgggggctcccaggaggctggtagggacatagagtcatatgctgttgggactactggcaagaaggaccagctggcatcctaggtagcaaagcaggcgtgcattatcacattctacccattcacatatgcaggtagtgatacaccctgtgcacgttcaaatggtcctcgctcttcccatgttactgttccctacccacactcatggatgggaaatccacgggggataccgataaacacacggtgcccaccctcggcagctcatcctgggaagacaagatttgttgacctagtatgaagacgttacttggccatacccacattgtgctgggcgagggctctggtacccttagcagagggcaggcccatcataagaggaaccaggcttggaagtgtacagcaagggtggtctactacttaaagataaggctcgcttggattaaagatcataggttttgttttgttttgttttgagatagtctcactctttcacccaggctggggtgcagtggtgcgatcttggttcactgccacctccgcctcccagggtcaagcgattctcctgcctcagcctcccgagtagctgggattacaggcatgtgccaacgtgcccggttaatttttgttttttttttttttgagacggagtctcgctctgtcgcccaagccggactgcggattgcagtggcgcaatcttggctcactgcaagctccgcttcccgggttcacgccattctcctgcctcagcctcccaagtagctgggactacaagcgcccgccaccgcgcccggctaattttttgtatttttagtagagacggggtttcaccttgttagccaggatggtctcgatctcctgacctcatgatccacccgcctcggcctcccaaagtgctgggattacaggcgtgagccaccgcgcccggccaatttttgtatttttagtaaaggcagggtttcaccacgttggtcaagctggtctcgatctcctgacattaggtgatccgcccgactcagcctcccagagtgctgggattacaggtgagagccactgcatccagccaggtcacagacttctatgactacaagaaatgtgtcactaatcatttttatgaaatctccagccctgggtttactctctcctccctgctaaaagcaagtgggttctcaaaaaacctcctgggtgtttccttactgcaaccatggcttggatcttcactccagcatccctgactgctgcgtagcgcttgttgaggttggcaattcttccatccaagtctaacagggcctctttcttattgtcctttctttcaaacagcgggttggccgaccagtcctggaaggaaagcacaggagtgagaaaaggtgttctggagaaactgctttcagtcgcagtcctttgctgtgtgcttttgatgtgagtttcgtcactgctgcctgatcttggattggagtctagttctccacgatccatgcccatcaggggctactaaggacctgtgcctaattgactgttgaccagagaaccttaaataatttagctcaaaaccaaaaccagggcctaggggaaccacagaaagaccattgagatgtttcactcaactgggccagaatggggtcactctcaggaaaggagcatctaattctctctttagggggacggaaggacccgagcgtcgaggagtgtgtggtcaatactgggtggatcgtccatagctgcaaacggagggccacgtgggagtaagtcccttttgtgggggccactgatctgccgacaagggtgggaaagggtagagagtagggtcaggaccctggctcccctgcaagtgggagttctaccacaagggtggtggccacttggccgggcgcggtggcccatgcctgtaatcccagcactttgggaggctgaggcaggcggatcacgaggtcaggagatcgagaccatcctggctaacacggtgaaaccctgtctctactaaaaatacaaaaaattagccgcgcatggtggcgggcacctgtagtcccagctaccaggaggctgaggcaggagaatggcgtgaacccgggaggcagagcttgcagtgagccgagatcacgccactccactccagcctggggcacagagcgagactcagtctcaaaaaaaaaaaaaaaaaaaaaaaaggtgggggtggtggccacttttaattatgatttggactttactgttatctgtcattagattttttttccctacacatctccattaaagtgatacatatatggtaacaaaacacctaataagttttttttgtcaaaaaacagtctttggccatatctccctatcctccatcccatcccccactggaaacatgagggaacctcacctttcctcctcctcacggctgcctctgtcactcttatcatttacggactctacatcatcaattcagctgtttctcagctgcctctgtgactctggggtgaacgatgaagacttagatcacccgcctccctcctctggccagtgtttgatatttacgtgagtacttatagtttttctactgatgcttttgtgtgaacataaacgatatgattaagcctgtgtttaccttgttagaaggatttcctttttttattagcagttttattgcttcatggtcagaaaaacgcgttctgtatatgtcttagtcagcttagattactataagcaaaataccatatactagggggcttaagcaacagacatttctcacaggtttagaggttagaaatctgagatcaaggtgccggcatgtttggttccaggtgagggctctcttcctggtgggcagatgatgatggccgccttcttgttgtgacctcacatggcggaggggcagagtgagctctctcatgtctgttgctataagggcacgaatctccttcgtgatggctctattctcatgttctgattgcctccccagggccacgtctccaagacccatcacagcagggatcacggcttccacaaaggagtgtttgagagtcacaaacgtacagtccatggcagtataataatgctgtgttagccttcccattacatttgcgttctgcccatttttcaactcttctaatagcttttgcttttatttatatagctatattaacaatattctcattgggaacacaacattttaggacaactataatttttatatagattttacttgattttgtatggttagctaaatatatatttttgcctctagttgttctttgctgattaatattttatgtgtatgtatgtatgcaaggatgtatatatgtctgtgaataagactaccatttgaaatttttttttttttcctttgaaacagggtcgtgctttgtcactcaggctggagggcagtggcacaatctcaggtcactgcagcctcgacctcccaggctcaaaagtgatcctcccacgtcagcctccagaatagctgggaccacaggtgttgtccagcctgagcaacataggaaggccctaggctcaagcaatactcctgcttgggcttcccaaagtgtttggactacaggcatgagccattgagctcggctgtgagaactgccatcttttaaaggtcaaaaatggtcaattattggaagtttcatatggtttcacctacttgtcaatcattttatcttcaacctttccattttgttttagatatctcttggaagtagcatataactacatttttaaacaatctattttgcttttaaatactttatatatactgtaactaatgtttgccctttgttatcacgttttatcctttctgctttctcaccgtttccctttgttgtggtattttgctttaaaaactatagcttatttgcttttatattctttactgatttggataggagaaatcctgtttctaattccactagaacttgccattaagtttattaagtcttttaaatgtttctctaattttggaaataaaaattgcagctgggcatggtgattcatgcccgtaatctcagaactttggcaggccaaggctgatggatcacctgaggccaggaatttgagacctgcctgaacaacatggtgaaaccccatctctactaaaaatacaaaaatttaccaggcatggtggcccatgcctgtaatcccagctatttgggaggctgaagcaggagaatcgcttgaacccagaggcggaggttgcagcaagccgagattgtgccattgtactccagcctgggtgacagagtaagactccatctcaagaaagaaaaaaaaaaattgcttttgattctcattatccacgtttaggaattcaggatatggttaacttccctgccccaacttttttcctcctcctaactaccaattatcaatcatgtttatcaccatggatatggtttctaccatttatatttttctacaagtattgcttttgactttggaatgtaaccttttacaaccgtatttatctctttatatacttacctctttatatttaattggttccaagctcattgctagtctttttaaatgttaatgctctccttggtactctagaatgtggttgacctcttggtatcctggaatacatcctggaataggtttctcaggaagggtatccaaatggtatttttccaagcccctgcatgtgtgaggatgactttactgctgcattcacagataattgtcaggagtctttctcaagactggccatttttatcatgttctggagatctgtgtaaagtcaaaaggctgcctgatttttgtttctgtgtgggctacctgcttggtagaaacatgcagaatattgttctgtatccttgggattgtaaactttggtcagaatatgtctacatgtgtcatctggcctggaaatcagttacccactttgaccaccacactcaggccttcctttaatttttgtctccccagcttgagaaaattttcttctattacatctttgttcattactattttttttttttttttttgagatggagtctcactctgtctcccaggctggagtgcagtggtgtgacctcagctcactgcaacctccacctcccaggttcaagcaattctcctgcctcagcctctctagtagctgggatcataggtgtgtgccaccacacctggctcctttttgtatttttagtagagacagggtttcgccatgtgggccaggctggtcttgaactcctgacctcaagtgatcggcctgccttggcctcccaaagtgctgggattacaggtgtgagccaccatgcccagcctattacttctttagtaacaactatgatttttatgttgttcgtctccctcatcttacacattatctattgttatttccctttgcatattagcaatttcctaaaattgtcctccgtttaatatatccactgttacacagcactagttctagtctaactggtgcttcagtatattttaattctgcttttgcagttttgactttcttagccatgtcctttcccttctctgctttcctctcattctgttcttagttctcattctgttgttatttcgtagatgtcatggcctttttttttttttttttttggagacagagtcttgctctgtcacccaggctggagtgcagtggcacgatctcggctcactgcaagctccgcctcctgggttcacaacattctcctgcctcagcctcccaagtagctggaactacaggcgcccgccactacacctggctaattttttgtatttttagtagagacggagtttcaccgtgttagccaggatggtctcgatctcctgacctcgtgatccacccgcctcggcctcccaaagtgctgggattacacgcatgagccactgcacccggccacggcctttttaatttaagaaaaaatgtcttaggtttactaaataaagagcttcagtcggtctgtgtttttctgagatatctaaacgacttgttactctcaaatgctgcacaatctttgaacagcctccttttggtcctaacccctttgctgttcacacctgagggctaagggcacagcctgagaatgtacaaactccaaacaggaattgttgattccaggcctgatggactgagtttgagccattttcttttcctattgcttggttttctcactaagctggggagctagatgctgctggctgtcatgtctgtttttgctagttttgagacggcatctgagggcatgtgcctgggagccagtgttctccccggctctgcttccgcacctaagtgcagagcatgctggtcccctccaccaagccccttggctttcagcctggtcactgtgcagctgctgcagcttcagaatggacgtgatgaggaaagtgatggggatggagacacaggaggtcagctgattctgtgaccagtttagtgattattctccttataatgggggttagcagagcccctattgggtgagtgttatgaactgcacgtctgtgttctctcatctcccaaaattcacatattcgagtcctagctcctgtgtggttgtaataggaggcagggaccttggcaagtgcttgggtttagatgagataatgagatcatgagagtagggcccacccctgatgaggttagtgtcctttaagcagagaaagagacaccagagcaacctctctctactacgtgaggcacatcgagaaggcagccgtctgcacaccaggaagagggccctcaccaggaactcagtctgcagtattttcttgtagcctcctgaaatgaccaggacagtgggcccaagtgtttgccttccctcctcggaggtcacctttgcttttctgatgcagaggtgaacttcttcaaaactcacccctgaacccaacaacctcagaattggcaaacagatcattccttccttggtgcccagagacccaactaccgggcttcagcatctcagctcagcaccaggagaaagcaaatactttgtggtttagttaaaaacttctggtgcaaacaagctagctcaggtaaaggggggtttatgtaagacagtgggtctcagagacagagagaaagtgctgccctggtcctctgtagcgggtggtgggcagtggtcaagctggggcctcaggggcagcaggaatctctgcaggatctgcctccagagtgggcctcctcccgtctcctgctcgctccccaccgcccagagcctgcagccaaccctctgagaccctgcacctgctgcggcccctgctgaagattcagaagcccgtggggtttgaacggcctggtttctggatttaacagttcagtagaggagagagagagaacagccacagaggaggctgggtgagcattgcaggtaacagaaaggacagagaccccttggcatgaaacaaagtgaagagatcgagaagccacacgtgcagagacagacaagagacctggcccccagacctgagacactggggaaatggcctgtgtgccagagcagacagggaggtgtggggaggcgtggggaggaggaggagcgacgtcatgcccactagctggcgagacaacgccatcaacaggctagaagaatgttacgacgtccagcggacattaacacaaggaggcacacgtctggacactttggtgacattttctgaccctaaagataacgaagaactctgcacgccccagacagagaggacaggctcatgcaggaaggaggcagagcactgccagcctgcccagcactgaaactgaggcagggctggtaggggctgaactgtgccccccaaatccgtgtgtaggggccctgacacccatacctcagaatgcaatggcatttggagatgagagctttaaagaggtgcttaagttaatatgaggtcattagtgtgggccctcatccagcatgaccagtgtccttatgagacaaggagatgaggacacagacacacagagggaggaccctgtgaagccacagggagaagacagcatctataactaaccagagagtcctgggggagccaaccctgccgacaccttaaccttggccttccagcctccagaactgtgagaagagaaacgtctgttgttgaagtcgcccagactgtggcagtttgtgatggccgccctagcaaacacacacagggccgtttctggagcagtgaaagaaaaggaccgtatcaagaaacccctgacctggacaagatcattgtagatgaggtcaaaagaaagatattttggacaagggaggactcaaagtatgctatcaatgagccctttctgaggaaattgcgtgagaaattattcccgtcaattgaaaattgaatcagagccagatgcggtggctcacgcctgtaatcccagcactttgggaagctgagacaggcggatcatttgaggtcaggagttcaagaccagcctgggcaacatggtgaaacctcatctccactaaaaaaacaaaaacaaaaacaaaattccttttggatatattgctgcaagtgtttttgcacattagagcatcagtgacagaccagaccacctagaaggctaatgaaggattcccccagtgctccggaaggagcttgagttagaactgtactgcttctgtactgagcaacgggctcgttcccagtgggggtgagtcttggcagatctctttccaccccttgctactggcactggcctggcacagagggggccttgtggagctcagcagaatggagcagaactgaatttcacagagcaactgggctctttctgccctgggaccactctgatatcatcctaccggtggagagcactgcacggcagctcccactgcaccccacacatcgcagcactttccatgggcctctacgtagcctggtttgccccagggcagccccaggcccccacaaagccccactctgtgctctgccccttgcttaccttcatagcctgggaaattccttctatattttgttttgccttttgcatcctgttctgcaagttgtgcagaatttctcgcacctcttgaatgtactgaaacacacctaaaatggaaatgtagaggaatcttacaaaatgaacaattcaggctgggcgcggtggctcaagcttgtaatctcagccctttgggaggtcagggcaggcgaatcacgaggtcgggagttcgagaccagcctgggcaacatggtgaaaccccatctctactaaaaatacaaaaaattagctgggcatagcagtgggcacctgtaatcccagctactcgggaggctgaggcagtagaatagcttgaacccgggaggcagaggttgcagtgagccgagattgtgccattgtactccagcccaggcaacagagtgagactctatctcaggaaaaaaaaaaaaaaaattcagcaggatgaaaacttttcttgggttggcttaacactcatcactatgagacagccctgggaaaatactcctattctggaacatgattcccagaagaaatcgctgggcgttctctgaaatgaaatgccaaggaatcacaaatatagtgtccctttggacatagggtttggagaatgtgtggacccttcaccccacgtaggagccccagactcctcacgttaaagggttccacctctgggagcatcagagatggggccagggggtcgggggccttctgcctcgtccagtggtggaatgaagggaagacagggactcgtgactacacttcttcctactttgctgacgtctgccctgagttagccaagatgtgcaccagctctgctcaccagctgtgcatgctctgtgcatgcttgataaaccaacagtggaaactgggcctccagcaagcccagtttgggaaacttggaaacctcttggcagttcccagggagtctttgccggattccgtttctaagtgacacagatgggctttttttttttttttttgcctgggcaggcaggtggaagtaactatcctttagcccccttgaagttaaagcagatccacacagccaggaggcagaagtgaccactctagtggtgtttgaggacagatgctgggcaggttggactcccaagtttaatccaatgtgggaggaatgtggcctccgtaccttcgccattccagaataatgtcgtttcagcgctcaataacttgacatcaattgcttccagttctgactttattagtagaaattctactgccttcactatagtctttatctgaaaaacagaggtgacaggttttgttccgagtccaaccagattttaaattgttctctggtaaggaccttttattcctcaacaccaactaatacggtttggatctgtgtccccactcaggtctcatgttgaattgtaatccccagtgttggaggtggggcctggtgggaggtgactggatcatggggacaatgatctcatgaatggtgtagcatcaccccccgatgccgttcttgggatagtgaatgaattctcgtgcaatctcctttttaaacaggtgtagcacctcccccacttctctctcgatcctggcttgtgccaagtgatgtgcctgcttccccttcaccttccaccatgattccaagtttcctgaggtccccccagaaacagaaaccactatgcttcctgtacagcctgcagagccatgagctaattaaacctcttttctttataaattacccagtcccaggtttttgtgttttttttttttttttttttttttttttttttttttaagatggagtctcactctgtcacccaggctggagtacagtggcgtgatcttggctcactgcaatctctgcctcccgggttcaagcaattctcctgcctcagcctccccagtagctgggactataggcatgcgccaccatgcccagctaatttttgtatttttagtagacgcagggtttcactatgttggccaggctggtcttgaactcctgacctcaaatgatccacccaccttggcctctcaaagtcccaggtgtcaagtatttctttatagcaatgtaacagcctaatacaccaacaaagccaatgatgattgttttttatttggaaatcgtatttcaggacactccacaatttttagaatgacttttatcactgaggatttatgtacggttactgttttatgttatagtattcctatctctttctagcccataccatgactaattaagaattaactgtgtataggttggtgtaaaagtaattgccatcttttccgttacttttaatacataaatcctcagtatataatcacaaaggtttgtacttgatttctttttgtgattctaagccaaagaaatacatgtggatcactgagcatttcttggctcagaccctttccctggtcaatctaaagctcaaaatcttttttttaatatagagatgggatcttgctatgttgcccaggctggtctcaaactcctgagctccagccatcttcccacttcagtctcccaaagtgctgggattacaggtgtgagtcatggtgcccagcctaaagcctgaagttcagttatacaacagaaaacccaggatctgcagagaaactattcaagttgttaatggatcagtgttaacaatagtatagtttctcactttgggaggccgaggcaggcagatcacttaaggtcaggagttcaagaccagcctggccaacatggtgaaatcttgtctctactaaaaatacaaaaattagcccggtgtggtggtgtgcacctgtaatccctacttgggaggccaaggtgcgagaatcgcttgaacccaggaggtgaaggttgcagtgagccaagatcgcaccactgcactccagcctggacaatagaatgagactctgtctcaaaaaaaaaaaaaaaaaaaaaaaaaaaaaaaaaaaggataggttctatatagttttgttctagtttgccctactctaagaaattaatttaatgcttgaaatcctgaatttacaaaacagaacaaacaagggagaagttttcatgattcccttaaataataagcaccatttaggcctaggaatctcatcgtaccaagcaacatcttgtttcatgacttctctaggacccttctacatgaagtatggaatcacagagttaaaaatacacactagatgctgatttgcctttcagaataattctttacatacattttggtactttattttttgagacggagtctcgctctgccacccaggctggagtgcagtggcgtgatcttggctcactgcaacctccgcctgccaggttcaagcgattctcctgtctcagcttcctgagtagctggaactacaggcgcccaccaccaagcccaggtaatttttttattttttgtagggatagggtattagcacgttggccaggctggcctcgaactcctgacctcaagtgatccacccacctcggcctcccaaagtgctgagattacaggcatgagccactgcgcccagcccattttagtgctttaaatagtgtacttccacccatgccttcgaatgttttctgaccattaactcgtaggataggtgcttaggaaagagaaatagagtataagagctgttaccggctgaaaaccagacagaagtaaaggatgcatctacaggattacaaagcaagacgatgtgtagcaggattccgtccatcagggttgggttgttaaacaatgacaaggacagtggtctcttcccagtcgaggaaccctgctctgagactacaccctacgtgagagaatctcagaacacacctctttagtgtgctcgtgactaaatcatggtgctcctaccatacctggagtccaaggcgggagctctttagacagaatctaaccagctggagaaaggtgctgtgtttctaatgaatggaccatggacaaagatattacggcccctggtgatcagaatctggggagccctgccacggctgccggggagaggagcaagattccgtcacaaaaaaaaaaaaaaaaaaaaaaagaggcaagaaggtcaaaagagaaggcatcagtgtgatgacggaagcacaagttggagtgatgtgcttcgaacatgaaataatgtggccgcgagggttaatttgtcaacaggactgtgccacagggtgcccagattaaacatggtttctgaggtgcgtgaggttgtttctggatgagataagcattggaatgggtgggctcaggaaagcagatagccctccccagtgtgggtgggtctcatccaaccgttgagggcctgaatagcacaaaaggcggaggaaggaggaattcaccccttgtttctgcctcatggcctgagctgggccatctcatcatcttcagcctttggactgggatttacaccatctgttcccctagttgtcaggctttggactcagagtaacaccacctgctttcctgagtttccaacttgcagacagcaggctgtaagacttcttaccctctgtaattgcgtgaggcaattcctcacaataaatctccatatatacatgtctatatctctgtctgtccatccatctccatccatccatctgtatctatcccccccatctatagctatctatccattcatccacctatataatctatccatccatctacctgctttcctatctctctagctaccgatctatctatccatccatccctccatcctcccatctgtctatcccattggttctgtttctctggagaactctaactaatacaatggccatgagcccaggaaggtgcagcctctagacgctggaaaagacaaggagacagaccatccccttgagcctccagaaggaggcagcccagcggatgccttgactccagcagaatgaaacagatccaggacttctgacctccagaactagaaggtaggaaatacgtgccgtttaaagtcactcagtttgtggtgatttgttacagcagcaacaggaaatgaacagtgtccagactggccctgttgtactgtggcttggggtggggtcaaagttgtatggtacaaatggtcgcctttcccagggtatatgagtggaatccataagaaatggtgtctagaaggaggacaagcacagtgactgcccgctgagccccacagccacgctctccgggcccctcctgattgtacagggatgtttgtagcagctttatttgtaaaagcgaaaactgaaaacaacccgaatgcccatcaacagaggaatggataatagtgctatatccatgcgacacattgccactcagcaataaaattgactcacgtttaaaaagaagaagaatggtgctacatgcaacaacatagattaactcaaaataattaaccgagtgaaagcagacagagaaaacagaacacgtatgataccattgccctccggttcccgactcggcttccagggcctcgtgccaggaaggaggtgccctcaacaagccctgtgttgctggacgggaccgccccccacctccaacaattactgggaagtttttccaaagtcaacctcttgattactgcgtcaggtccctagatcagatggtgccaggaatcaaggccaaaaaggagttcttgaaccaaagagctgagcagggaccgccacctcctagcccctcacacacagcttcctcatgataatcctactctgggttccaggaaatgcccatccagtcctccccacattaacagaagtaatggaagcaatgttgaatgactttaatattatccaaaatttgttcaggagggtaaatagatctataaagaatcatgtaattggccaggcttggggccttatgcctgtaatcccaacactttgggaggcagaggcgggcaaatcacctaaggtcaagagttcgagaccagcctggccaatgtggtgaaactgtgtctctactaaaaatacaaaaattatttgtatttttactaccaccagctgggcttggtggtacacgcctgtagtcccagctactcaggaggctgagccaggagaatcgcttgaacttgggaggcagaggttacagtgagcctagattgtgccactgcactccagcctgggtgacagagtgagactgtctcaaaaaaaaaaaaaaaaaaaaaaaaaaagtaacgtaagccaaagcccagtgggaataagatattcatcaccagctgttctgagtcatcactatctttgctgctatttgcatgaataatgaagactggcttgaaccatgtctaaatattaaaatacacactaatttaattctgttctgcttggagatcttacaccagaagttgttgggtgacaacaaatgctggtgtaagatctccaagtggaacagaacaggacggcaggacagagatctctgactccctggctcaggaatttatcccaagcacatacacatagcaggtactcagtaagtatgcagtgaatggaagaatgaatttgagtgaatgggaagatttcccaggaagagccacatctctgaaacacacaaacaaacttgacaaaaaaccaaaacaatacaaagctgcatcaggaatagtaccgactcaccaactcacctcattataccagccaacgatgagctccaggttgcccacaaacttccggaaagtttcgttctctgagaacagactctccgcactgtctggaatctctttctgttgctggaaattcaaatacttgacttctctcagaactgccaccaactaaatgacaaacgaagatcaaagaacatgtcagcaggtcaggtcaacagtgcagtgttcaagcaacagaaatgagcatctgccctgggatgttttgacagccgggggggatctcaaagttggtgggaggcagtatttgttggcaggaccaggacgttttcaccctgttggctgatcctgagccggaaagcactgacatcaccctcatgggtggatgacatcaccctcatgggtggatgacatcaccctcatgggtggatgacatcaccctcatgggtggatgacatcatcattgcatgtgtatgacatcattgtcatcaccacgggtgggtgacattatccttatgggtggatgatgtcatcattgtaggtggatgatatcatcatcaccatgggtggctgacatcatcctaattttcttatctctgtcctctcctacctactacccacaagtggtttggagtaagacttcgggtcttcacttgtttcctcgctggaatctaaccttctgttttctctctgctttcacccggttatgacccgagatcaacaacagggacatcccttccaacagtgcttctgtccacaaagctattctcaaagttgagataacctccatattgctgaatccactggtcacatcacgggcctcatctcatgggatcgcccagccgctggcactctttccttctgggcacacagtgtcctcctggcttccaggacactagacattcctggtcaccattattagtctcttttgataatctcaagatgtccatgatggggagccacagaccttgttccttctcaatttaccctcagttgaatgaggtgtgatgtcatccaacgttatagctgccttgaccagccagcccatttgtcatctccgctgaatgaggtaatgagatgtccagtgttgtggctacaagtaccatctctgtgtgggtggctcccacgtttatgtctccaaccccagcctctctcgtgacttccagccttctgtatccacccgcctactcagctcctctctttggatgtccaggtgacatctcacacccaacaaggctaaagcacagcagcccatcctcccctgtggcctctgccccacctgccctcttggccaatggcaattctacctgtctactcacctgaccctaaaacattgggactgactcccctcttccaatcacgctccatttccaacctactaggagtctccatggcactatattcaagtccagaagctcaccaccaccttcactgctgccactctggttccagccaccacctcccagctgtcatctcttgcctggactgtgccaacaggctcccaactgattttcctgctctttcctccagccccagctccgttcaatctacgcacctcacagcgtggagaagggtcctttacaactagaaatctaatcgcagcacacctctgtctgacaccctgcaggggctgccatcttgctcaaaccaaactccaagtccctctgtggtccatggggcccttcctcgtcacctctcatctcttctcctacgaccttcccctttgcccattcccccgccccactggcctccttgctgctcctggactgcaccaggctctcgggcgccacctggccttttctttacccgcatgccgtgctgcaaagctgttccctccatctctgctcagcggcactctgacctcccacaagtctctgctcacatctaaaattgcacctgccccttctaccggctctattgatcttcttaacctgcccttcctgctcttccttccgcggaacctgttgcaccttctaccatatcatacacttgactccctcgtgaatgctagctgatcatcctccccgccctcctgcctggaggtaggctctaggagggcaggacagacagctctctgactgtctggatcactaatttatcccaagcacatacatgtagtaggtgctcagtaagtatttggtgaacgaaagaatgaatgttagtgagtgggaagatttccaaggaagagccgcatctctggtttccctgccttgccacgtgcagattgggcagctctggggctgtgcttgtaggaattcggttccatcctctgctcatctgaactttccgggttttagccatagaacccacatcccagagcccacaagtgtgaattctccccagtgtgcctgccttgaccagccagtgcatttatctagattcggcaaagactttttccccccccccagtttcaaattgtcatttcttcttgggatcacaggaacgctttcaagaagatactcattgaagctattgtcaaagttgcttctgctttccctcatgtcttaaatataccctggacacacttaagaagtaaagctttaggcgaactgtgatataaacatcgacctccataaatccgtgctgagggaaccttggcaggccctccccccgctcccaaggagcctttgacgcggtccccactcctggcacccaccgctttgctgaagttgacgtggatgaggttgctagcggcgtcccgcagaatcagcggctgccccaggttaaagtggcagtcctggtccacgcccgccacccactgctggtagatcttctcgcggtggcacctcagcagctccatcatctcgtcatacttctgataggtcagcttggcctctgctccagacatgaccctggaatcagagcgggaaggcgaggccccactggatatctcctgtggggtgtcttcggcacgtcccatcgttgctgcccgatctggggtgccgaagcggccggccacccaattactcgaggctcacagactgaatatgcaaacaagcagtggccagaccaaatgttcaaatggaactccgacctgcagtctgcagccaccagcccaggaggccaaaatagaacccacgcagcaactggctcccgaccgccaggcctggatgaatgacagccagcccctctccaactttccttctcccttccaacctggggccaactagatgaaagcaaatacgccccccaaacaaccacataaaaggcccccctcctagtcagctgcaccggcctccccaggccaagccggggctcccctgcagccgtccctgcgtccaccgtgaagcctccccggcccctggctgtccaggagacttggccaagtgcacgcaacagtggctcagtcagctgcatacacagcctcttcctgttcctgcctgggtggtcttcatgtctaccaggctggtgggcaagggtggggaccagccagatttctcctgagcactcccaccaagaaggtgatcaggggaggagggaggaccagaaggggtctcttctgggcttttgctctgggaggtaacagtctggtcgacaggaggggtggtcccgctcggggttgggacagtccctctcgctctcccgcaccatggaggcggggtgcctgcccctgcccagggctgtgactcacgggtgttcgacgtgcttcaggtgtttcatggacacctctagcctctcctgcagctccaggctccatttgagctgcccggccacgggaggcatgtttttgtggatcagggggatgttcccctcctcggaggccgccatctgggcatcgtacaagatcttagcattgtctagctcagcgtcaaacagctccagcatgactgaatacctgggcgccacctcggcaagaatcaggggccgctccatgaggcccccacacatgtacaggagctgaggacaaaggagaagggggcctcttcaccacagtctcctccccttccccagcctgtggctgtggacaaaacgggcagggccaatcttcaggagtgagagaatgtgtaccttgccaaaacaaaacaatccactggaacctttgtgtgtgtcaactggctcagtggaagcctctatgcttttctcattgacttaggccgagtccccaaatacttggcttataatcccacagtacaaataagtccaagggctacaagagttttttctaagcctaggaaaaatcagaattctggtaaggaagacttaaacaattaaaaaataggctgagcaccatggctcacacctgttattccaacactttgaggggccgaggcgggagggtcacttgagcccaggagtttgagaccagcctgggcaacacagcaaaatcctgtttctacaaaaaataaaaataaaaaatacaaagaatacatgaaactagcggggtccagtttttgtattcttttgggtgtgcgcttatagttccagctactcaggaggctgagatgggaggattacttgagccccagaggtcaaggctgcagtgagccaagattgcaccactgcaccccagcctgggcaacagagcaagaccctgtctccagaaaaaacaaacccaaaacaactccaagtaaacaattttaaaatagccataacgttgcatttatatacctgggcttctactctgatacagataaatgaagaaatattttatccacaggaagcgttcctcttaggaagagcactgccactctcaagggcagctgaggcaagaaaaccaccatcaggaaatgtgtttcgctctgagaaagctctgggggtcagaccaagtgggagggggaccagagagagggaagacaacctcacacgaaacagggtcccccagtgctgggtgtgagtgggaaatccaagagagtttcccggggctgccataacccacgcccaatgggggccagaccagctgcggtgagcctgagtctcagactttccccagacttgggtctgagaaaggtgaccactgtccctagaaatggccacaggaggaaaaaccaaaacatgactgcgaagagagggagatttttcaggcccccaagagtacagatttcccaaatgcaagattgcggctatttttaagttaattgtgtttttcaaaattgttcaaatcttccttacccaaattctgatttctcctgggcttagaaaaaaattgtcacccttggacctatttgtattgtgagttgtacaaatggagcagccgtggactctcaggcagacatggaaacgctggtgtcctgccagctaccgccttcctccacggtcgcctgctgacgtatgaggtcaccagtttcatttgttcaaagcattgacatggggcagttggaaaaaaaaaatgttcctcttaatggtttatgactatcctgtaatgcgggtagatgttttacttggaagtcagaaaaatagaaaaaaaccccaaaaacctgaagacccatcatccagacaaccgacacacctgtaatcccaacactttgaggggccgaggcgggaggcatttttatttttctctgtcttcccatttctctctcctccttttcatgtttatatagtttttagtttaatgacttttggaaaggaagcgaattctattttccgccaaaaggagatcatgtggaaaattgctctagaacgttcctggctgtgtgcgagttgctgataatgagaactaactccggaacaggcaggggctggaagggacaacaagggagagaaaccccagggccctatcctatttagagcacagggctgtcaaaccagggggaaaatgttcttaggtcaaagagaaacgtgaacagatggcgatggaaatgggttacaagagttatttctccccctgcctccctcccctccgcttttctttgttttaaattgagcataaacatacgtgaaaatttttaaaaagagatctttcttttagagcccaaaagcccctcttgaccctaacaggtgccagggatgcaggggaaagcctggggcggggtgactgcatttgttcctcgctagctccattctgcagaggtcgggttgggtttcttccaggacctcctgctcctcacagggtaggggcctagggctcccgaggggtcacaaagttgaactcgccaacccagctccctccccactgccggatcccctagtgaaccctgggggaggttcagcccagacccgtacgctggtccttatctgctcttccccttgtgccaaactagatgcaggtggcacaatctccatgttggggacagcaagactctggggactcatctggccctggccgggtgaccaagttacttaatttttcagatttttccacatcggaacagcagcagggagtcacagcacctccccgtggagccagtgttaggggtgcaggagccacagaagccagctgcccgcccgcccagcccataagcctgtgccccatctttaattttggagacccaaaagtgaggtttccaaatgaaagaattggctccattgggacccttctgcgctggggcagtcctgacgcttttgtgttatccttcaggggctccacgtggaaggcttatgctagagcgaaactacctcccaacaacattcagaacaaccagcctcccttgtcaagagccagttgtgcactgcaggaaatactcagaagcgcctgccctgtgctaggctcagttctaagggaactcaaatccagtgcctgacctcagggagtttaccttctagtcaggaagacaacgaacacacagacattagtatacaaatgaatatgagggaaggccattgctgagaagggaccagcctgggggcatttgagtggaaggaaggaagtgaggaccctgcaactagatgcagctacctggggaagagccttctgagaaagggaatgttgccagattctttgcttagccaaagattctcatcagggtctccatcctccaccatcccgcaggggatgtctgattaccctaacctgcttccagctagaatcttgaagttggtttagctagaatcccccaacccctgatgtcccctctaagtaattttctatccatggactcccaccctgctcctttgctagaaattcctacttacctgcagtgtattcaaagctgagctcccatcgctctccctacacctgtatctattgagatggtataaatcgtgagtaaggtctgaatcaagtcagcctcatcttgctttagcaagtataactgaataattttttcaaccacagcaaggaggtgctgtattaatttgcattcattgatattttgcctggaacaccaactcgatccaagacttacttgatccttaatttgcggagcttcaaactctcatgtatttgcatttttgcaagagcattcaaaagggcaaaggaacatcctgacgtttgtcggggagagatctttgtccttagcaatctcagccttgaaatcctcctgaaagatgaccaccagcccaggctgcccaggccaacccaattgccttcacagtcatgggagctggtccggctaaactgttcagatcaggggccctggaagcagtcaagcccagaactcatgggcctgggaaacatagcaaaaccttgtctctacagaaacaaaaagtaggccaggcgtggtagctcacgcctgtaatcccagcactttgggaggctgaggtgggcggatcacctgaggtcaggagttcgagaccagcccaacatggcaaaaccccatctctagcaaaaatagaaaaattagccaggtgtggtggcgtatgcctataattccagctactagggaggctgaggcaggagaatcgtttgaacccgggaggcggaggttgcagtgtgctgggattgtgccactacactccagcctgggcaacaagaacaagactccatctcaaaaaacaaacaaacaacaaaaacaaaacaaaacaaaaaacaaacaaaccccttaaaactaaaaatagagaccccagagacctcccttgccccttctgccatgtaaggaccaaatgaaaagatggccttctaggaacggaagtagaccctcaccagacaccgagtctgctggacctcccagcctccagaactgagagaagtgaaatgtttgttgtttaagccacccggtctacagcagtttgttatagtagcctgcatggacgaaggcactctataaattcagctcagtgggccaaaatctgcattaattttatttttacaccaactttacctctttaactttcactccttttgagtagtgggaaaactgaatcaagaataaatggtccccttgtttcttagtgagcataagaagtatcagtaaaataatgccatctcacactcacttgctcctcttcctctaggatgtggcagtaagaaccatcaggagctacactgggtgttcacggctgactgactctgaggcacaggagacgggccctccctccctggacatcagctctacatggagaggatgaaatggtctccaagatcgttctcgacatgaatccaccaccacagtgccaggctccagatctgcctgcgtctccactgcatgcttacctttgcggaggacttgatacagctgcagtcatcaaatccttggcaaaagatcgtggccagcctcctatccaggtcttggattttgatctcaaaatcagcataatcacggtcaaaattctaaaagcaaatggaaatgtcaaccttgtaatcagcgtgcaaagcaagccaagggcaccctctccagcccctgccctgctgagaggactcgggactgaggcgcagctgaatgtgctgttgcggggaccgctctacacagttttcaaagtgttgggatcacctggcacctgcttcctccgtgtgccctcccatcacacccctaagctggtaccgaggctggtgctgttctcaccgagtccagttcatccaaccctgcccgaggacctaccgagtctccagggtccaagggatcatatttgcagtcggcaaaaaccttcaccagctcaaagacctcatcatagatacgggtcaccaggctcccgaggaggttcccacgcacgcccccaagctcgattttctccagcttcagaaactcaattgctgttttatagagttcctagtggaggagaaaaacacagtcaattcatcttcacaacccaactcacgggtccagttacaaaactagctctgaccccaggcaggaggagctggggagcaaaatgtccccaggagacaccaaccatgggggtgggaggacaccctctgtgtctgtgctgttctttaagcaaatattccatcccctgcagaaagaggggatggaaggaagggctctgtgaattatctatgaggtgtgaatgaggaggagctggagaggataaagtttgggatcctgtcctgaccccagactggccaaaccgcatctctaaataaatcacactctgctgggacctccgttttctccgctgtgggaagcggttggaatggtgctgaagatttctgatgctcttgctaagctttaaattccccgctacctggaagaccatcctatgcagagtgccgtgtcccgaaggtgatccaagaagaaagcggctggaatgcttggatggacacacgtgtagaaaattctgcttcctcgccggtgtggctcatgccccctctccctgaagcgctccctgactattttggcccatagcaatgcattccttcccaggggcccggtctcccatctgcgccgcttgtgtttgctttagtcacgttcaggcccatcccgttagctggttgtgtgtgtgcagttcctgtttcccaaatgaggtctccaaggctccctggatgctcttctgtgcccctgcacctaccaggcacagtgcaggcagagtttagactggagatcttcctgtggacttgacatcactcccctgaactggtgctgaggttggtgctattctcccaggtccacgaagcatcaggccacgcaccaacaccaccccgaggagacaggcaccgaggaccaggagctcttggctcttccacccgacgcggaggacacagacaagctggcatggcctgttgtcagggggtggacagcaaagccatttcctccacctccaaagtcccttcctacccagaatcttccttctgattcagaatcagtcatgtgggaaccagagctccttggcccaaagtgtgactgtgactctcctccacattctcggtctgggagatttcaggcattagtccgcgctctgtgactgcaattttgaactcctgagcgggcctccctcccctgccccccaggaggtgtagaagagaactggacaagcctctcccaagcctctgacaatggtgtccacccttaagtcaatgctttacagttccaggatgattttccccttttttaaggatgtgagttatacagttatatgtgcacaaagtttttaaaaattacaccatgcagaagatacaaaaggcaaaactttcttgccctaccccgtcttgatccctctcatctcttctctccagagccccagagaaaaccgccttgaagcttttttttgaaacagggtctcactttgtcgctcaggctggactgcagtggcgcaatcatgactcaccacagcctcaaacttctgagctcaagtgatcctccctcctcggcctgccagagttctgggattacaggtgtgagccactgggctgggccatgcaccatttttaagtttttatctgctgtgcgtcactccgtgtatccacatggtgcttgcacgggggccttcataagtctccatttgtaataattgagtcccactaagtgactgctgttggcccccaggcgtcctgaacgtgggggtttaacttatcagtaacccgctcatgataggatgcacgagataaggggagaagcacccgaagtgggtcatttttattcttggctaacagctctggccacggcagatgctgccgcaaagccttggtttcctcataacagatatttgggcctcacttattttctgcctgggggattattggcaaggggggtagggatggacgctgcaggtgtcctagggtaggagcagtctgggaagtggaggtcaagatgcaccgagttctgtttttacctcaatggtctggatgcgctggaagaaggaatttatcctggaaaaggcaagagaagaagggaattcccaaggcacgggctctttgtccttagaggagagaaagagagatgaggccacgtttgcttcaaatgtcccaagtttatcaaatatcggggctcatatgaactcactcgtcctgccttggccctcgccctgcgaggaaggggtaccttaaagaaaagcttcatgttcacgcagcagaagtcgtacgtctggtagagctccttcagcacatttacagccagggagatgccactcaggacttcctcgatttcaccttgcaggcccttcagcacctcttccgggctcaggaaggttcgtgtctgggcaaaagagaagacagacatctaaagctccgacaagccatttggggtgacgtccaggcacgccgcctgcaggacctgtgatctgttctgacatatggatatctgaaaataacccctcctatctgcccactgctgggccgtttttaggggaccgagctgcttcccctcctcggcccctcatcctttgccaaggctgcagcataaatgggtgggggtcgcagatgatgagaggccctccagggacaggggaccccggtgcccttctggtcctgcagacggggccacagcatggttttattatatagaggtggcccagggatacagcccttcagctcgaacgccatggctggctagcaggtgcttatgaatgggaagaaggaaaagaagtctctgctaagggagacggaaggtggtttgatgtgcgattagagaagcccacaaagcactagatgggtctcggggtacggggactctcagggcagacctcctcctctgtccccgtcttccctttcttttccctcagtaccctcccctagaagaactctaggtagccttgaagagggctccatctcagctcggggcctgaaaaggcttgtgctgacatcttggcctgctttcaaactgctggggaacatgggcagcaggaaaacagtgaaccggggaggggacccagccaggaggggaggaaggggacccaggggccaggggagggttaccatctcgatgatttggttgcagaactcctgcaggatgacgatgatcctggcaggtgtgttatagtactcagaggtggcccagatgaagcagatggtgtccagcaccttggcaatgaaggtggggagctggggggagacaggcccaggcacactggaggggactggccgctgcaccttatcccggtgtcccagcccttcccttcccatggctctcactgggtatccagcagagggttcccaaagaggaggggagaggcaactccctaggcccacacatctgatggcagccaagaaacccacggccccacatgccttgaagaaacaagacccaggccgggcgtggtggctcacgcctgtaatcccagcactttgggaggccgaggtgggcggatcatgaggtcaggagatcgagaccatcctggccaacataatgaaaccccatctctactaaaaatacaaaaattagctgggcatggtggcacatgcctgtaatcccagctactcgggaggcagaggcaggagaatcccttgaaccagggagttggaggttgcagtgagccgagatcgcgccacagcactctagcctggtgacagagcgagactccctctcaaaaaaaaaaaaaaaaaaaaaagaaaaaagaaaagaaaagaaaagaaacaagaccctccccaccaaagccggctctcccttgcctgcgcaccatcgtgaagtcggcttgttccatctcctccagcaggatccgtaggggcttcaaatagagcacgatgtcgttggcttccttcagccctgcacggaacaagaacaagtgcccaccggtaagagagcagaaattgctcagaaacgatgagggtgcggctccatgtgctgagacctgctccttcaggaaatggggcctttctcaagtggagggggctgagaaagctgctcgcagagggaggccaacatcctagggttggtgacaagtctgacccagccctcccaggaggcacaaacagcttcgtgcagaactcatgacagggtcacaggctcaccttcagtgacgttggtgtaaacgttttgcagggctggccagtagcagcttttggctttctctaggatctcaacaatcttgttcactttgggtctgtttagctgagaaggggagtgaagatccacctttcattgacctggaagaccctaaggcgaggccaacctgaccttgtggctggctggagctgcagaatttacgcaggtcatcagagccctcaggactcctgggaggttggcactgggaggcggagagctcggcccggtcgcccagctgggacgaggctgcagccccacaggagagaggaggccgtacctgttcatggatgcacttgaggttcagcagccgagtgtcccagaactcgaactccacttggggcagggggtgcagcccatccagcagcgcctgggctgagtctttgctcagcacatcccggatctggtgggaccagtcgatgatggtggtttcaatggcgtgcaggagcaagttgtccagtgaagaggggatcctgcccagtggaaggttggggcattgctctcatggcgacacacacgtgggtcccaccaagctctcccatgaatccttctgcccaccaatcccaaaccaccagcagcagcaccgtctggtctcatgtccctggtgcctccagccacctcggggacgctaaagaagttcccaagactcccagctaggaagagagcccagggaaataatgggcgtggtcagagataccagggcctggaggcgctcacctccaaggaagcgggagagaattaagtaaaccctatttaaaccctattcaagatggctcccctggtgtcaccaccggacatggtgcttggggctttgtgaatgatcagtggaggacttgcccacgtgaggcaaaatacggaactaattgtcacgggggtctcacatatcagggcggttgcaaattgtggcaaggcaggtgcgaggggacaccttggagtcccttgggcttcccagggcctctgggggcaccgcagcctctacacagacttgcatgtacctgctgagagtccctcccactcccactcactgaccctgtcccacatcttaaagctgtgcctcctgtttcctggccatgctgacaggtgggacaccttctgcttgctgggtggtgactggatcggcacacatgtgtgacccagcggggggtgtggggtgcaggtgccagagccccaggggctgcagagcctgctccctccctgccctggtttcaacttcctcagtctcagcaccacctaacgcaccaccttgccctgcatttccccggctttaacatgtgaagccactctgcagggaaacaacgggtcggagtggggtggagtggggtggggggtgggggtcaagcatgtgcctcttccccacccagcggcagccggaagcagctgggcccacacacctctccatggactccagcgtgccatccaggctgcccaggtgctccggaataggcagcaaggttttgcctttgatcttgccactcatcacaaacatttcattcttcagcctgtggacctgcttcacgatgtcttccgagaccacctggggccatccagccatgttctcactttggtttaacagagaagagaggacctaaaaggaaacacttctgtggttccgccccctgtgccttcaccagctcggcaaccgcacagagccaggtccccggggggttccaaagacccggtgtctggagccctgggaaaactgggtcccgcacagagccaggtccccagggggattccaaagacctggtgtctggagccctgggaaaactggatccttcttccagaaggaggtgtggccggtcatggagtttataccagctgccctgtcctggtggtaccaaagccatccccaagctcttgcacccatagcacacactccttgctaaaagcctaggaggactgtgatgggtcaaactgtgtcccccaaatccatctgctgaagccctaactcccagcaccttagaatgtgactatttggagatagggtctttaaagaggtgagtaagggctgggggcggtagctcatacctgtaaatcctaggacttagggaggccgaggcaggtacatcacctgaggtcaagagtttgagaccagcctggccaacatggtgaaacctcgtctctactgaaaatataaaaattagccaggcatggtggcacctgcctataatcccagctatttgggaggctgaggcaagagaatcatttgaacctgggaggtggaggttgcagtgagctgagatcacaccattgccctccagactggacaacagagcaaaaatactgtcaaaaaaaaaaaaaaagaggtgagtaattaaaatcagattactagggtgggccctagtctgacaggtgtccttacgaggaggggagattagacatgcacagaaggccgaccacatgaggacccagggagaagatgtccatctgcaagtcaaggagagaggccttggggaaaaccaaccccgccgacaccttcaacttcaacctctagcctccaggactgtgagaaaatgtctggtgtacaagcgaagcacacaggcccctgtactgcagatgagaagagtgatgaccaggaaggataaggcacccccattctggaggtccgaatccccaaagtgtgtcccccccacctacacagcacctgccaagggggacagcagagggacacataaaatgacactccattttttcccctttcttaagtcaaagtctcaaaattggagaaacctatctgccagtactcagtccccaccttcccaggccatgggcagcaaccgtacccggcacagcatggcagtctcaatgctgtccagagagaacaaggggatgctcggggcttctcagacttcaagggcacgagcaccacctggaggtcttgttagacagcaggtctgtggccgggcatgatggctcacgcctataatcccaacagtttgggaggttgaggcaggaggatcgcttgagcccaggagtcttgagaccagcctgggcaacaggctattttttggtgagacctcatctcttaccaaaaaatacgaaaattagccaggtgtggtggtgcatgcctgtggtcccagctactcaggaggctgaggctggaggattggttgagcttaggaggttgaggctgcagtgagctgtgctcccaccactgcactccagcctgggaagcagagtgagaccctgtctcaaaaaaaaaaaaaaatttaaaaaccaaaagcaagcaggtctgtctcagcaggtcagggtggacggggcccgagcgcctgcatttccaatccctccccggctctgcagctgctgctggcccagggactccaggctgagcagcaggactcaaggccgctcccgagaagtcggtcgtgctcgacaccccggatggcagcctggacgcactcacctcctccaccaccgcgatcagctggtccacgggtgtggggctgatgtcgccgtaaaggagccgggccctgtagttgtccttgttgatgttctcggactttgtcttgatgaagtaaacccctttggacttgagggactgggggaagcccaggcagggtatgatcatgccggctgcattgagcgtcagcaccagcacctggacgtcgggcttttcaaagaactctgtgaacagggccacgttctcctcggcgcctatcagcttgctccacttgtccggcttgaacttcaggacgatggaggcaacttcctccagatactctagtctgacgtccggggccattgtcatcttggcctttccttacactgtgtatctgttaagagtgcaagaaacaggtacgaactgtctcccgggctccccaatttcccacccatccctggcaccgcaggaaatctctgtttctaccggagcaggaacaaaacagttggtcgagagtgtgcagtttttagctgtggttgggttggggtgggggtgctttagcaggtgctggcacctgccccggccccgccatggggggtgccccgggagtgaggctgcccaaaagtggtgtgtgcttacaatcctgtgaccataaagttcagaggatgggaaagatagagatgaatgctggagaaagagagaaaaggaaatggccgcaaccagacagtgtgaaggggatggggtaggaaaaggcagaacaagaggctggggggtcaggttgaaaggtcctgggaaagcaataaaagacgtcgcagccccagagtatgtgtgaaacgcaagaaggaagcagaccccacgtgcaggccgtgaggctcagcgctcagtcttagccgcagccgtggtgcaccttaactttcactctgctctgcaccctttctccctccagcccccagcgtgcacccctaaaagaatcgagctgcaaattcctgacagacccctcacaagctgctcagatgctcgggggtagggttaactagagaattggggggaagggatccccttaaagaacaccctgaagtcccaaagtttaggcaagtgaggtacttacagaatttaaagacacacccaaacagtcatcaagagaaaaggcatgtcaatatttttaaacatcaaaatgaatgcaaacaaatttatgaacaaaataccaaagtttcaaataaagacaggctctggcaagaggcctgaggtgggggccttggaggcgagttctgcaagggcagggttgaatgcaaagggtcgcctgatgctgtgttttcatcacaatctgggaggtatgcagctcctgaatttcaaggggaaccctggggtattcagctgctctgggggtccgtgggctggggctggcctgctccagacctggcagctgctgaaaagcatcagggtggacagatgacgttggaagcactcacaaattctgccttttggtttgacccaagctattgcttttaagtttgtaacagcctacagttccccaaaagacacgtaataccacggaacaggtttatttcaccctggccactatatatcggcaaaacaactatatgatgggaagcagtagtggatagcatttggatgctattcaaatggtctgagatttattcaaggctccaaacatctctgagagaggacttggggaatatttggccagcaaatggcagaaacatggcggtccacgagcaaagccacccgattcaggcacatctgtgaaagaaaaaggggacaccaccaggcaagtaggaggagcaccgcgtggcatttatggagatgactcgttcaccaggttcccacagggctttcagcatgctgctgaattaatctccacccaggatctccgagacccggggacgcgtcacgtcgtcatttcctagggggatcaggaactcaggggagcccgagtcctggaaggttcctgattggaagtctcgccaagctggtcaggcgactggactggagggaaacatcctctggtttactgattttgtggatttgggctttcacaaagtcatcttttcttccaagaacggcatggggtgggctgcctcccaagccataacatgtgtgggctgaggggcccctacaccccgcaagtttcttgcacgatcgggaggtctcatctcaggctcccacccagccgtttcctgggctgaaggccaggaggtcccagttaacaatagggttgtcccaggccatgcttccggaggggcagagacggcttctctgggaggtggcccatgccccaggccttcaggactccacaggaggaagctggggctaggggcttccaggagaagccagggggctgaggcaaggccttcccaggagcagggaagagtctggagccctggaaggggtcaggctggtacgtggcagccagcctcggggtcccagagccatgaacagctcccggtggcgagcagagccacttctggggtaagtggagggtctgctgtctgccagggcctaggtcccacctccatcctctgaaggcctccctgctccctccaccttggcctccgactcccccagcatggttgaaggccgctcaccagctgaaggcaaacagcttctcccgcaaactgatgagcaactctttcccaaaccaggaaagaaaatggctcccttccctcgaggggctccaactgccacataacttctgggagtctcctcacggtacctggggcttctagaaccttccccttgggacccaagtaaccaatgatagcgcagcaaatgaggaaccaaccgtcaccccacagtggaaaggctcttagatgatcattttgaggggaggttggaggggggacagggtcgcgctctgttacccaggctggagtgcagtggtacaatcataactcactgcagcctcaaactcctgggcttacgtgatccccccccctcagcctcctgagaagttaggacaacagacgcacatcaccacacctggctaatttttgtactttttgtagagatgaggtctcactctgttgcccaggctggtctcaaactcctggcctcaagcaatcctcccaaagtggaaaggaagacattatctctgtttacaataaggtgatcttgtatgtagaaaatcccaagaaatccataaaattgtagagctaatagaggaattcagcaagtttgcagtatacaagatatttgaaaattaattatatttctctgtaattatattatgaacaatctgatgatgaaatttagaaaacaattgtccccataatgaacaatctgatcatgaaatttagaaaacaactcccatttacaacagcatcaaaataatttcgtttacaatagcgtcaaaaacaacaaaatacttaggaataaactttaaaaagaagtgttaagacttgtacactgaaaactgcaaaacatcatggaaataaagacaacctaaatcaatggaaggacatgctgtgttcatgggttagaagattgttaagacgggccaggcgtgatggctcacgcctgtaatcccagcactttgggaggccaaggcgggtggatcacgaggtcaggagatcgagaccatcctggctaacacggtgaaaccccatctctactaaaaatacaaaaaaattagccgggcgtggtggtgggtgcctgtagttccagctactcaggaggctgaggcaggagaatggcatgtacctgggaggcggagcttgcagtgagccgagatcccgccattgccctccagcctgggagacagagtgagactccgtctcaaaaaaaaaaaaaaaagaagattgttaagatgacgacagttctcctcaagttgatctgcagattcaacacaatccttatcaaactctcagctgccttttttgtagaaatgaccctagattttatagggaagtatgagggaacaaaaaccatccaaacaactttgaaaaagaacaaagtctgaagacacacacttcctgatttcaaaactcactacaaagctacagttatcaagacagtgctaccagcataacaatagacagagatcactagaatagaattgaggttccagaaataaatgcatccatttatggacgattgagttagcaaaggtgccaagacaactcaatgggaaaagaatcaccttttcaacaaatggtattggaataactgaatacccacatgcggaaaaacgaagctgggcccttacctcacgccatctacacgaattaactcagcatagattaacagaatgcaagagccaaatgtaagagctaaaactataaaactcttagaagagcacacaggagttgatctgacctcagatgaggcaatgatgtcttacatatgatgccaaaagcataagtgagcaaaggaaaaaagataagtttaacttcatcaaaaccaaaaacttttatgcttcaaaaggcaccctaaaaaagggaaaagatgacccatagaatgggagaaaatatttgcaaatcatatatctgacaagggacttgtcgtaatacaataaaacaacctaattttaaggagtaaaggatatagatatttcttcaagaaagatacacaaatgaccagtatgcacatggaaagcagcttgatatcattagccattaggaaaatgcaaatcaaagtaaaatgaacttcaatgaggtccctagagtagtcaaattcattaagtagaatggaggttgccaagggctagggagggagaataggaatttattttttaatggggccgtcagaggcatttgaaccagagccactccattttgaatggggtctgggtaaaataaggccctactgcattcccaggaggtgaaggcattcttagtcacagggtgagacgggggttcagcacaagtcataaagagcttgctgataaaacaggttgcggtaaagaagctggccaaagcccaccaaaaccaagatgacctctggtggtcctcactgctacactcccaccagcaccgtaacagtttgcaaatgccatggcaatgtcaggaagttaccctagatggtctaaaaaggggaggcatgaataatccaccccttgtttagcatatcctcaagaaataaccataaaaatgggcaaccagcagccctcaggctgctctgcctatggagttgccattctttcattcctttactttcttaataaacttgtttcactttactctatggactcaccctgaatttcttcttgcacgagatccaagaaccctctcttggggtctggatctggacccctttctggtaacagggtcagagtttcaatttgggatagtgaagaagttctagagatggatggtggtggtgtttttacaacgatgtaagtgtactcagtgccacggaactgtacacttaaaatggctaaaatggtaaatgttatgctctgtgtattttcccacacaaaaaaaccccaattcattcccactagaatggataaaattgagaagacagaaaaaaacaaaacaaaacaccaggcacgggcaaggatgtgaaggaattggcaccctcatccacggctgatatggtataaacattgcagccactttggaaaagtgacagttccccaaaaggttaaacatggggctaccaattagctaccccctcctaggggtgcaccagggagaaatcaaaacacacacatattcgcagcagcattcttcataataaactaaaagtagaggtgaaggaagacctctgtcccggctcagagggacatgggaggggtggcagggtcctgtccccggtgggctgagggcagccacattggcagcagggtgcccggcagcatccctgccatgtgaggataggaaggccaccctcgggctctccagaagctaccagggaagggcaatgaacggaacagactttgtacaatcttagggtgtgtccaccacagaagttggcactgtcccacaccaacatccaggagcaaaatcagtgccactaaaccgtcacttcagttctgcatatcaccccagagctcccagacacaggggtactcagcaagcccccacaaattccagctgtctgccacttgagctagtaaccaggcccctctggagacgtcagcttcctcggccacagttctgaggatgagtatccctgagccatggggcgttaggggcaagaagggcattcctggttccagaaacacatggtgcttattgcaaaggagagctggccagctcatgcccacattggcctaagaagagtcctggctaccgttttctgagcgatcaccgggtggcaggttctacacttcatgagcctcctggaaggcacaggagctccatccttcttcagcttctgcctgtggccctgccctcgaccctgggatgtcacctccttccccctggggaggtagcagcttcctgctgctgatctctgggtcacctcccagtcccgctgggctcctcagctctcctgtcgtgtgcaacacagcctctccggcttgagtacccacgtggttctcctccatgttctgcttagatactgtcgcagtttcttgtggctgctatcaaagcaccacaaccttaggcggctaagacaacaaaaagttctctctcccgggggctgaggtctgaatcaaggtgtcgggcagagctgtgctccctccgcagctctgggagacttcttggccttttccagcctttggtggccgccatcaagcagtcctcggcattcctggcctgtggctgcatccctcccatcattgcctctgtcctcacacagccagctctgtgtgtgttgggagcaatctccctttgtctctctcttacaaggacccctgggagggcatttaggttctccccacgtaatccaggattacatcatcatctccagattcttaatcacatctgcaaaggccctttttccaaatagggtagcattcatatgctgaagctttaacccccaacatggctgtatctgagatggggtccttaggaggtaaagtcaaatgaggtcattagagaggggctataattcagtgggattttaagaagagaaagagcagctgggaatggtggctcacgcctgtaatcccagcagtgtgggaggcccaggtgggtggattacctgaggtcaggagttcaagaccagcctgaccaacatggtaaaacctcgtctctactaaaaatacaaaaaaaaaaaaaaaaaatagctgggcatggtggcaggtgcctgtaatcccagctactagagaggctgaggcagaagagtcgcttgaaccctgcaggcagaggttgcagtgagctgagatcatgccattgcactacagcttgggccacagagccagactccatctcaaaaaataataacaacaaaagagagatctctttctctctccaccctgcgaggacacagcaagaagtcagagtctataacccaggtgagggtcctcaccagaacccaaccatgctggtccctgatctccgacttccagcctcaagaactgtgagaacatgaatctccgctctttaaacctcccagtctgtgccagcacatagttcattttacccatcagctggaacagccatggtgcccagattaagcattaattctgggtgtgtctgtgagggggtttctggatgagcctggcatttgatagtgaacttggtagattgccctccccagtgggcaggcatcccctaattcttcaaggtcttgaatagaaccaaaagcagaaagagaaattcacccatctgctcctgcctttgtgtctgggctgagacatctcatcttctcttgcccttgggctgctgttgacaccatcagcgcccctgcttcccaggccttcagacttggactaaactacactgtgggctttcctggttctccagtttgcagacagcagagtgggacttctcagccttcataatcacgtgagccaatcctcatgaaactgctgtccctctatcttgcctattggttctgcttccctggagggcactgatacgcgtatatgatatacagcatgagcagtccaatcctttcctcatctgtctccaacctcttctatcatctttcaaacagctcaagtcactaccatcttggaaaaagcaatcctgttcaagctcttcgccctctccatctctacgcctcttcactgccacatttctctaaagaatggcctggccaggcagggtggctcacacttgtaatcccagcactttgggaggccaaggcaagtggatcacaaggtcaggagttcgagaccagcctggccaatatggtgaagccctgtctctactaaaaatacaaaaaattagccgggcatggtggcacgcacctgtagtcccagctactcgggaggctgaggcaggagaatcacctgaatctgggaaacagagattacagtgagccgagatcacaccattgcactccagcctgggtgagacgctgtctcaaaaagagaatggcctggaacatatatttctactttcccattctttctctccacaccaccactcccatgtggcttcctccctgcccactgcaccaaccctgggaagccagaagaactgaactggagggaagagatgtaacctgaatgccttaacccagaggctgctcatagctcgttggctcaccccatattggtcacgccaggtcacatggtcacatctcactgcacaggaggctgggaaatgtagtctttggctgtgatgtggtttggatgcttgtctcctcgaaatttcatgttgaaatgtgatcccccatgttggaggtggggcctagtgcaaggtattgggtcatgggggcagattcctcatgaatggtttggtaccctccatgcagtaatgagtgccttcttgctctgtgagttcatgtgagatccagttgtttaaaagaacttggaactctggctgggcgtggtggctcatgcctgtaatcccagcatgttgggaggtcgagatgggtggattgcttgaggccaggagttcaagaccagcctagccaacacagtgaaaccccatcactactaaaaatacaaaaattagccaggcatggtggctcatggctgtagtcctagctactagggagggtaagtcatgagaattgctggaacccaggaggcagaggttgcagtgagtcaagatcacgccactgcactccagcctgggtgacagagtgagactccgtctcaaaaaaattaaaaaaaataaaagataaaataaaatcctgaaactccttccttactctctcactccttctcttgccatgttcttaccatgtgatactccagctcccccttcatctcccatcatgattggaagcttcctgaagcctcccagaagttgagcagatgccagtgccatgcttgtgcaagcctgcagaactgtgagccaaataatagacctctttcctttataaattacccagtcttaggtattcctttatagcaatgcaaaatggactaacacaggctggcatccagctgtccaccctagacttggagagttgtgttactaaatggaccaagagagtccatggaaggattgtccacagccaatctccaccacactcgcctagattcatcctgagctcaaagaaactccttggaagcctcatgggaccctcaaaactcaacatgtacaaaaccgacctctgcccatgccccccccccaccctgccatccccacactcctggtcgtctttcaggttccctggctccgtgagtgacccacagctgctcaggcacccagaggaccctcgccctcactgtggtaccattcagtcttacctcctcaatctctctgagctctgtccacctctttccacagctaatcctcctggtctaagccactctcaccctccccaggcctatggataccctcattcctttcttaacaacttcttttgtccccatatagcccattctccagcatctttaaaaagacaactctcaggccaggtgccatgtctcacacctgtaattccaacactttgggaggccaaggcaggcggatcacttgaggccaggagttccagaccagtctggccaacatggcaaaaccccatctctactaaacaaaaatacaaaaattagccaggcatggtggcaggcgcctgtagtcccagctactggggaggctgaggcaggagaatggcttgaacccaggaggtggaggttgcagtgagctgagattgtgccactgcactccagtctgggcaacacagactcggtctcagaatataaaacattttaattaaaaaaacagaaaaagacaactctcaatgccttgcttaaaacccatgaactattgctcctaggatacaattcaaatgccctccatgggccctgtaagatttgatccctgccttgcccactctcctggggtccaatcctggctcgtgctatagtcacattggtctctttcaggtcctccaagacatctgccaaccatagggtcctcctgcctggccaagaatcctatgcacgcgcacacacacacgtatacatatgcagacatatgcacgcacacccatgcatgcatgtacacacacccctaccagctcctactcagccctgagagcccagcttcagtatcattccttactgtctcccgtcaatctccccagtaggctctttttatcatagctccttgtgttcctgtgtggcacccattccagctgcagtgagccaatcacctaagcactcatgggttacctcactgccgcctctcacacctagggccaccccttctgatcagcaccatcactctggaatctgacactgtgtctggcccacagccagcctttgataaacatcactgaagggacagcagctctgggaagccctgttgcaaagactcatctaacctcaccttacccagtgatccccaaacttgcttggccgtggaagccttctttcctttcagtttgtgtttggttgttttttgtttgttgtttatgtttgtgtgtgtgcgtgtgcgtgtgtgtgttttgtgtgatggaatctccctctgtcacccaggctggagtgcaatgatgtgatctctgctcactgcaacccccaggttcaagcgattctcctgcctcagcctccagagtagctgggattgcaggcatgtgccaccacatctggctaatctttgtatttttagtagagacagggtttcactatgttggccaggctggtctcaaactcttgaccccaagtgatccacccacctcagcctcccaaagtgctggggttacaggcatgagccactgcacctgtcctgctaaatcaagtttatcctaaagctgccttcttacatattttaagtttggtctaaaggtttctctgtatgtagtgagctataacctaaatagagtcataaacagactgtaacctactcttgtgccagtcacagggttttggccaatcaaagatggccgactgttcaaaccacgttcaagtccaacatggagctgtaaccaatcctgctggtctgtgcttcacttccattttctacatatcacttttccttcttctgtccataaatcgtccaccacgtggctgccctggagtctgagcttactctggcttgggaagctgcccgatttgcaaattggtctttgcccaattaaacggttacatttaatttgtctaaggtttttaacacctgaagccttatcactactctgaggaacagtttgaagaacactagaccaaggtctcagtgggtccagctcccaccggagctgtgcttctctggggtctccgagttcaagggctccatgacagatgcaggaggcagataagcgggaggtccccagagaatctccaacctgcgcactggttggaccgggtggagccactggaggttctcgctgtttgcatgggggaggtaagcctggcctctttagtccctggatgtgtggcccggaatcaatctatgaggtggggggcctgttagcgcggctccctctcactttgctgggagttttttatttttcatttttgcccagtaaattccgttcccctcctgcttcagtgtgtctgcgtgcctaatttttcctggtcgtgtgacaaaagcctggttttagctgaatgaaggagctaagttctgcaacaccaagactgggacatctgttggtgacgtggtgacctgaagggagttggggatgtggccccttgagcctcaaactgcagcactagggctctgctgggcattgcaggaggcttgagggatgtggagaaacagcttccagctgccccgacatcacacctgaggaccttgtgcaaagaagatagagaaggaccctcactttccaggagcacagccagctttttggggtggatgcaccatgctgtccacggtgcagcagaaacatcaggccctcaggaagtggcgagagcagtggggacagagtatgacaggcaggggacagaggagtatgacaggcaggggacagaggagtatgacaggcaggggacagaggagtatgacaggcaggggacagaggagtatgacaggcaggggacagagtatgacaggcaggggacagagtatgacaggcagataaatcttgggaaccccaaactcgctaagccaaagggaaaagtcaagctgggaactggaccatgcgctcccatttttgttcctaagtgagacagctacaagacaaggccacacacctccctcacattgcgcccacaaggaaattcccctttaaatactgaagccctcaaaatcatcagagaaaggcatcaacttgcctcccaagcacgtgtccttaacttttgcagataaacctcctgaaatgatttcattttcctcaattggcaggagctcgctgtgtttctcttcctgactgggcgttggattggtgtgtgtggggttgtctggcttcagtcctcactgccagggccaccagccaagggcccccttcactcatttttttgagtgaaatttcttgtgggccccaagatctttaccctaaagggtttctgttaaatttcaccatggcaatgtcaattgatagcttaccttcacaggtgtcggggagacactgcactgactgagacatccctctgcccacctgaggcaagtgcatagctgattgcttcctctgccccattgtctacgttatcttaggtaacaatgcagattcaccaagccagacaaaggcatgaatgactattttcccctacctccctctcacatgaaaactgtgtatttctggctgggcacagtggcttacacctgtaatcccagcactttgggaggccgaggcaggtggatcacttgaggtcaggagttccagaccagcttggctaacatggtaaaaccccgtctccactatgactacaaaaaaattagctgagcatgatgatgtacacctgtagtcccagctactagggagggtgaggcaggagaatcacttgaacccaggagatgggggttgtggtgagctgagattgcaccactgcactccagcctgggcaacagagtaaaactccatctcccaaaaaaaaaaaaaaagaagagaaagaaaattgtatttctcaatagcctgcccttttccctttaaatattgaagccctcaaaatcatcttcagagaaaagcatagacctgcctcccaggcatatgtccttaattttggcaaataaacctcctgaaatgattgagactcacctggctcattttccttgattgacaggcacttgcctcatgtttctcttcctggctgggtgttggattgggggcaggggagtgggtgtctggcttcagtcctccctgccagggccaccagccgaggatgcccttcactctttttttgcttctgtcagtcacagcccacatcgaggtagggccgggatgagctgagagaactcagtcatccccaggggcaacacttcctcccagctgaatgaacttggaaggcaaatttcatgaagacattacccatcattaaagaaaatcgcaggtccctttcccgctgccggggatgcttgcagacaggagaggccgggccgtctgtgtttcatcaggctccccacctccctctgtctactggggccctgccgcgtgtcctcctgctgcgttcccagcagaggaacaggaggtggcctttgtcctcctgcccaggcgcgtccttacccttgaagttgggtggaaagggagggctgggcctgagcagtcaggctggccaggtagaccacccttcccttcaggggcaggacaccgcggccagagaagtccctgccagccaggtttccaaaggtcacagcaagggtacacgctgtggagacctgggaaccttttctctttaggagtctctgcacacaggtcctaagggtgaggcccccaacaaagcacagaaatgcatggattccaagccatccaggctgggaaacagtgtggggtctctggaggagtttgcctccgcccacacagggagacgtacctggggcacaggcagtggtcacagacacacctcatgtagactcaaagagatagggacagaccatatacgggatgttgcaaccggggaaagagccgaacttgatcccaacaccaccctgcagatggggacttacagccatgagcagcgaggggtcagtggatggaaaattgctaagaggagaacttcaagtgggggttcttgctaaaggcagaccaaggacctggatatggccgggggaaagcagaggtgctgaggaactcgatcagatttcaagggttggggtgactcagtaggattctctgctgagactggcgtgggcaggctgaggaccgggctcgagaacggaggccttatcaaaagagggttcagtgggccaggcacagtggctcacgcctgtaatcccagcactttggaaggccgaggcgggtggattgcctgaggtcagaagtttgagaccagcctggccaacatggtgaaaccccgtccctactaaaatacaaaaattagccaggcgtggtggcaggcgcctgtaatcccagccacttgggaggctgaggcaggagaatcgcttgaaccagagaggcagaggttgcagtgagccgagatcgcaccactgcactccagcctaggtgatagagtgagattctgtctcaaaaaaaaaaaaaaagagggctcagcagagtctgcctgaagttgggtcaaggagggagccttttgtcaggcctcagcataataagggggttctgaatctgggggaggaggaaaggtagattctcaggactccaggcagggcgcgtccctcccctggggcgtggtctggctcctgggggctggtgtctgttctcagccctcagtaggaacccttccacttcacatgggctgcctgtgatgtcagcatcgccaagccctgtccctcctgccatctccccatccgcacattctgtgtccaccgcaagcaccttcaggtggcatcggtccatctgacgcgtgctgagaaggcagtccggcccgcaggcatggggccgcccctccctgcccttcctctctgctcggtcatgctgtgattatgctgagaactgacagcacctgcaacctgcatttttattaattagataacacaagtcttctataattttcatttttattccccacccccccccaccgccactccacttagagcggaggttctcagagtggggcccctgggccaacagcctctgcatcagctggattctcgttgggatcacagagcccggggccaccccagattgtggggcagcaatctgtatttcacaagcccccaatggactctgatgcaggctaaggtttgagagtcactgatttagagtaaaattttggtttctgttttaagcaaattcactgaaagtagccagttatccttgttaaaaaggctttcagtgtttccctattttaggggtcttgctgtctgcccaggctggagtgcagtggcacaatcatacctcgctgcaatcttgacatctggggctcaaaccaacctcccacctcagctcctgagtagctgggactacaggggcacacaaccatgcctggctttttttattttttaattttttgaaagaaagggtatttctatattgcccaggctggccttgactcaagcaatcctcccatctcagcttcccgagtagctgagactacaggcccttgccaccacgcctggctaattttattttttgtagagacaaaaaagtaagactcacgttgttgcccaggctggtctcaagctcctggtctcagacaatcctcctgtctcggcctcccgaagttctcggcgcgcaggtatgaacccccacgcccagccttccctgctttatggtcattcacacctgaggcctgagttgccttcaacaagccccacgggttacctgagtggcaggtgtaacttaaggctgaggttctctgcttagccacgggcagaatcacctgggacgctttgagaattaagggcactggagggtcggggccaagcgtggaggctttcaaagcacctgtttgggtccaagtacacacagggcggggaatctttgctccatgggtccacgctcctcagaagtgacccttgctgctctgggtctatttcagcagaaccatcaccaaccaaacaaatgagaaatcagggcggattggactcagagacaaatgctttccggtgagcagccaggcgcacagcagaacgatagaggagcgctcagaactcgggagtacctgtcacctctgccatggtggctgggctcgctcacggtgactgtttccctagcaggagagaccctggctgtgaccctgcagcctgtgcctcctgctgctgcagggagagagggagtgcccggcgcctacctgggcttttccgggccgtccgtccgctcatcatgccccttgccccagctcacttcacatcttcgctgggtggggattcaaggacaggctgggctctaggaggtcaatggtccctccccgggcttccagcatgttgtagctcaacttctaccagacatctggaaataccaaatttctttccttaaagggacaaagaccccttttctttggaatatatatatatatatatatatatatatattttatttatttattttttttgagacagagtttcactcttgtgcaggctggagtgcaatggtacaatctcggctcactgcaatctccgcctgccgggttcaggtgattctcctgcctcagcctccagagtaactggaattacaggtgtgcaccaccacacccagctaattttgtattttttgtagagacggggggggggtttcaccatgttggccaggctggtctcgaactcctgacctcaggtaatccacctgccttggcctcccaaagtgctgggattacaggcgtgagccactgtgcccggccctggaatatatttttttaaaccctaaactgtattatagaataatctcttcctcagtgacttggtttataatatattgggaaaaaaaaaactctatgatgaaaatcaagtgctgtaagttaaatatctgagtccaaatgatgtcaaaaagcggcaaggcactgggcttcccccattcagagagcaccctccccttcctgccccgcgcttctgttgacctttggtcctgtttgcaggaagctctcaagtttaactctgaacttgaagggaaggaagggagtgaaccacatggccctggggtcggggcctctggccgaagggcgctcagcttggtctgtaaaatgaaatgtgttttgaatgtcatgagtcaggaaaaaagaatttgagcgcagtctggaaatgaaatttcctgcctgtggtttgactcacgtctgtctgtctcgaaatctaccccaaggacatttattccactgtgacagggctcatctctgaggagcaccagactcctgcggtggggagggaagattatccgcgctgcagagactagctggcctccggaagccgcctcctgaccccgcgtcaagcaccgcggtggatggcgcaacccagctttgggaattaattacccaaggcgcgtttccgtgcagtctggcctccctccctgaaggcttcttaagcaatagggaactaggaggagttgagaccagcctggcaaacgtggtgaaaccccatctctattaaaaatacagatgggggcagggcgcggtggctcacgcctgtaatcccagcactttgggaggccgaggcaggtggatcacttgaggtcaggagcttgagaccagcctggccaacatggtgaaaccccgtctctactaagaatacaaaaattagccgggcgtgcatgcgcctgtaatcccagctactggggaggctgaggcaggagaatcgcttgaacccaggaggcggagattgcagtgagctgagatcacaccactgcactccagcctgggtgacagagggagactctctctcaaaaaaaaaaaaaaaaaaaaaaaattatagatgggaacgaggaatcgcaacagtccttactgcctttcttgtcttgcctggctagtgctaaagtatgttgaggaaggaaaaaaattattttttacgatttcaaagttagttttatttagaagttttattgaggactagagaccgaccacagcctgggagaagtcttttagagggggtttgtcggactgttttgaaatagtgttttaatttacagtttatatacaggtagtgggggtttagtaggtgtaaaattatattaaagcttgggtataagagtatatctggttgtagattatagaataattattaaaaatgaaaaataaaatcctgagcctcaccaccaactgaatgaaccccctcttggccaagttgaccacatagtcacctgaaaaattgaattcccagcccgatctcccagggaggtgaggcatacctgcttatatcccctctctctctttctctttgttttttttgtttctgtttttttttttttttttttttttgagacggagtctcgctctgttgcccaggctggagtacagtggcgcgatcttggctcactgcaccctccacctcacaggttcaagcgattctcctgcctcagcctcctgagtagctgggattacaggcgccctccaccacacctggctacttttttgtatttttagtagagacggggtttcaccatgttagtcaggatggtctctatcccctctcttttggagtttaggcacagatgaccagcactaaggttagaaaagagatcagaagtctggcagaagagactcctgtggcaatgagataccatgttccaacttggccctggtgtagtatcacatgacagatggcagaccctgaaggaaatcaaaatattttaccccacaatatatttttttcttttttttggagacagggtctcgctctgttgcccaagctggagtgcagtggcacatctcagctcactgcaacctccgcctcctgggttcagatgattctcctgcctcagcctctcgagtagttgggatgacaggcgcccaccaccacacccagctaatttttgtatttttagtagagacggggtttcaccatgttggccaggcttgtctcgaactcctgacctcagatgatccgcccgcctaggcctcccaaggtgctgggattactggcgtgacatatgttgaaacggccctacaaagctgtcttttgtgagggaaatttgcattctgtagaaaagcaccattaatgcagccaggtctttcccagatctaggaaatactaagagtctgacacgtttaaggtctgaaaagagacattgaccacctatttcctctgaaggctgttacctggagatttcatctatacaacaagaaccttggtctccacaaccccccttatcttaactcaagcatttctttctactgacctcaagactttagccaaagcttaactctttcaaccaattgccaattggaaaatctttgaatcttcctgtgacctgtaagccctccaactcccacttcaaggtatcccaccactttaggctgaaccaatgtatacgctccatgtactgatttatgtctttgcctgtaactttggtctccctaaaatgcactgtaaaccaaaaatacaattctaagctcccccatcatctgaatggacctctcctcttggccaagggctttccaaagtcaacctgaaaaacagttcaacactttaaacattttagcaaaactattacttcgttatgttccaaattattccattcaattcagaagatattttctgagagtgcctattacacggaaaaggtaatcacagaatctgttacacaaactgggataccttttttttaagagacagagtctcgctatgttgcctaggctggtctggaactccagcctagaaggggatgttggacatgcctcattatgtcctcttccctttggaactcaggcacagctgaccagcagtaacatcaacacagagaccctaagactgatagaacagactctttagatctgataagaaacatttaccatctattctctctgaagcctgcctcctggaggcttcgtctgtgtggtaaaaccttggtctccacaaccccttatcttaacccagacattccaggtctttagagaatagctctttaaaccaattgccaatccgaaaatctttgaatctacctatgacctggaagtccccccaacccccaccccgacttccagttgtcccgcctttctggacccaaccaatgtacatcttacgtgtaatgactgatgcctcatgtctccataaaatgtatagaaccaagctggaacccaatcaccgtggacacacgttctcaggatctccgggggccactggtcactcatatttggctcagaataaatctcttcaaatatttcacacagtttgactcttttttgtcaacagtataaaaccaaattgtaacttcaccaccctgggcacactttctcaggaactcttgagacagttctgccactgtggttgctcatgttggctcaggataagcatctctgaatattttacagagtttggttttctcatcaacattgtgactctcatcagtggttaccatgtgtgtaggaaacaacaaggggtcaggttttttttttttttttttttttttgagatagagtttcattcttgttgcccagactggagtgcaatggcacgatctcagctcacggcaacctccgcctcccggcttcaagcagttctcccacctcagcctcccgagtagctgggattgtaggcatgcgccaccacacccggctgattttgtacttttagtagagatagggtttctccatgttggtcaggctggtctcgaactcctgacctcaggtgatctgcctgcctcggcctcggccaaaaatctgtaaactctgggttctctgagtttgctgaaacgcaaaacctctgagctcacagctgctcactcagcccaaagtgctgggattacaggtgtgatccactgcgcctggccaggtcaggtattttttaaggaatatagtgacttaggtaagagatgttgaaggggcaggtgttttgttttgtcttttaaatatttttgtggagagttacatgtcagcacagagtcaggggctatgcgaaattatgctcacaagcagaaatgagtaaacacggctttttatatttatttcattttgtaagttttctcttttgctcataaatccaccatccagttatgtttataagaccagtgttgactgtctcatggttaggaagcttcttttttaggaagacatgtaatttgtacttgtaaggaatgagtattgggcccagtgtgtatatttgtctatttatcggaaaatatgttttggattatatctattttttaattaatatgagctggcgtttttttttctgagacaggttctcactctgtcacccaggctggagtggagtgatatgatcgcagctcactgcagccttgacctcccgggctcaagtaatccttccacctcagcctcctgcataatgggactgcaggcacatgccaccatgatcagtgtgacacactggcctcctggccacatctgcactgtagcaaacggcttcctgagagaggaaaatgcaaactcctcatcaggctgcgaactctctgtggctggaaatttgtaaactctgagttctctgagtttgctgaaatgcaaaaactctgagctcacagctgctcacagggatttttgaggattttgcaaggggctaggtctgcccctaacccttccttcaagttcacagcctaccttaggggtggcagaggtcagcaaacctcccacaaagggccagggtgtactttaggctttgagagccagatgatctctgcggcagcatttcaactctgacactggagttctacagcagtcacagacaatatgtaagtgaataggcgtggctgtgtgccaataaaactttacttaaaacaggcagagggctagatttgggtccgcttcagtcaccccagtaattgggagaggcaaactcccatttctaaactattcctctctgttgccttctcagaaactttttgcctgctattgtccctacccccactttctcctcgtctaccagctcgctgccaccaaaatgcaaatatgccatagaatcccgcatctcaaaaacaagacaaggccacctccctccagctgccacccccctccagctgccaccccatccctctgcttcaagtagcggattcaaaaagcccatagcccacccactcctcagccgcctctgtggctttgacctccatcctcaccttctctaaaccagctctcatcaaagtcccatacagatccctccaaccatttttgcctggggcagtgtgtgtagccaggccagcaggcccagggggcaggttagggaggttcagagcacaaggaaacaggaagaggaaaaccttacttagcctttcaaaatgtttactgacctcatagaaagccctaaaaaaggcaaatggttagttaccgggctggctgggccttgcgtgctggcatctgttggtttacagcatgactggtatttagaatgacctggaagctcccaacttcgaattgtcccaaacctttccagaccgaaccaatgtataccttatatgtattgattgatgtcttatttacccccagaagttctataggttatacacctcccattttgtcagttgctgagactattgaattgcagaaaatgtacacctcatgtctcgcaaacctatgaatcgtcacagtggttgctccgtggtctttgcctcgtatctgttgtctaaacccaagccccaatggggacatatgttcttatccaagatgtccattttcctcacaaggcataagccagagatctctgaaatccacacagccaagctcctcagggtccatgctcagccatccacatcacagcatagcatctgcggcagaatcactgaagcaagagcggcagttttgggagggtcagaatcttgtcacttccagccacgtgactcctaaaccacgatttctaatcttgtggctcatgttagtcctacaaaggcaatctagtccccaggcaagaaggtctgccttgggaaggggctgttatcgtctttgttttaaaccataaatcatagagttataaactataaactaagtttctcccaaagctagttcaggaatgagctttggaatgagctcattccacccacggccaagaatgagcaaggacagcttggaggttagaagcaagatggggtcggttaagtcagatctttcactgtctcagtcatcagtttgcaaaggcagtttcgacaccacactgtcacgattactggagctttatagtaagttttaaaaatggagcagtggaggtcttgcaattgtgttcttttttttctttctttcttctttttttttttttttttttttgagacggagtctcactctatcacccaggctggagtgcagcggcgcgatctcagctcactgcaagctccacctcccgggttcatgccattctcctgcctcagcctcccgagtagctgggactacaggcgcccgccaccacgcccggctaattttttttttttttgtatttttagtggagacggggtttcaccgtattagccaggatggactcgatctcctgacctcgtgatccgcccgcctcggcctcccaaagtgctgggattacaggcatgagccaccgcgccttggccgtgttcttcttttcaaaggcgttttggttagcctaggtccttcacatttccatagcaatcttagaatcagattgtgaattcctatttttaaaaaattatctactggcatatttgtcgggactgcaataaatctgtagatcaacttggggagaactgacatctttacaatattgagtcttctgatccgtgagcatggcgtatctctccgtatatttaggtctttgaaattttctcttaacaaatgtttgcagcttttagtcaataaattgctacccagcagatatttaaacacacacacacacacacacacacacacacacacacacacactccacttctgtaatgccaagataatgtcttaacaatgaatgagaaaataactacttttgaagcaaattcttcctacagatcacactgttttgaaaatagatgttgggaagtatctctatggttatactgtttttgttgccgaatatgatctaactctttcacttattagaaactctcatatttgtatactttcaatcatgttgttacttctttagaaatcctcaagggctagtaccatttgtttacaagaaaacctgactgacgtgaagagaaatggaaatttcctagtcacatttcaggggaaaaatcattgcattattggtagctgaaaatgaacagtgaataccatgatgtaatcaacagagcgaatgatgtaactctatccgtggggtcttattgggattcagcaagctgtgataagaccatatggtgcacaactagaaagctctttttgttcatggcagcagctaccaaaatatcccagaggggagagctagccccccccacctccaatctcacagccagatgatcataaagcaaggctcggagcagagtctaccacacaaaatggcatttattatacaaacagtaatcagcagagcaggcaccaaacattcatatgtcctgcaagcatgaccgacatctaaagtttgtcccataggtgccctgaaagtgcacatgggcacccagcaggatctccttttttttttttttttttttttttgagacgaagtctcactttttcacccaggctggagtgcaatggcacaatctcagctcattgcaacttccacctcccgggttcaagcgattctcctgcctcagcctcccaagtagctgggattacagatgcccaccaccacgcccagttaattttttgtagagacggggtttcaccatgttgatcaggctggtcttgaactcctgacctcaggtgatccacccacctcggcctcccaaagtgctgggattatactgcaatctcactgcctctggtcagcgtcatgctgtgggaatcccccagtacccctggctggacaaaggacctcctaggactcctgctgcagccacccctaaggggtgaagggtgcaggccggggggactcttccaccctgtctgcgcaggggcagggaaggtctccaaaccacagcggactcacataccctggtggtcattagccagtctctaatctcaacaatagaaaagaagctatttttgacacccttttggcaaagtgccggttgcaaatggggatgccaatagcaggacttgtagtcaccacctcgagagggtggctctttctgataaaacgccggctgaccacctggcctgtgcctatgagagtgcaagtaagtcaatgactaattcgtcaagttaaagcttcaaccttctcacatacatgacatcacactaatgatggtggggtgttttcgagtgaattacagacattgtaattgacacatttaatttcttacagtcactttcctcctctgccagctattcaagccaaaaagcgaatctactgtgaattttagaatgactgccaagaaacacaaaagtacagccctggagacaatcatggagatgaaatgaaatcataaaatacatagtctgggccaggcgtggtgcctcacacctgtaatcccagcactttgggaggctgaggcaggcgaatcacctgaggtcaggagtttgagaccagcctgaccaacatggagaaaccccgcctctactaaaaatacaaaaattaaccgggcacggtggcacatgcctgtaatcccagctacttgggagggtgaggcaggagaattgcttgaaccagggaggtggaggttgcggtgagccaagattgcaccattgcactccagcctaggcaacaagagtgaaactctgtctcaaaaaataaataaaaataacctagtctgaaagaaagcagagaaacaggggaagcgaatgagagatggatggaacaagttgaaaacaaatagcaagacagtaggtttacattcattcctatcaatgattacattacacagccaggcctgagctgagagtgaaggtgggggtggaggtgggggtcggggaggagagatggggatgagaatgaggatgagggagaagctctttagcgggtgagagactgaagttatgatttagacctttggacctttttaaaatcattattattattattattattattattatttttgagacagggtctcactctgtcacccaggctggagtgcagtggcatgatcacggctcactgcatctgtgacctgctgggcttaagtgatcctcctaccttagccacctgagtagctgggactgcaggcatgcaccaccatgcccagctaatagtttaaaattttttttgtagagacgaggtctcattgtgttgcctaggctggtctcaaactcctgagctcaagcaatcctcccacctcagcctcccaaagttctgtgattataggcgtgagccacttcatccggccgacctttggtccttttaatgcccaaaaatgagaaatcctgtgaagaaacccacatagctgggaacctgcccaaggtcacacacagctttactgaaatggcatcacagcgagaacctgcgaaggtccaggtcgggagattccagcgtcatgaccaggcttggtgctgaaggacacccaggggcccacctttctctgattcctagtaaggaaaagtacagagtgcccatgaactccaacttacaaacagctgaaagtctcccctacaaggcaaatagaaatgactgctgtcagcagcaacgctgatctaatagcaactacatctctggatttgcaagacagatgacacctgggggttttaaagatggactgtttatggggtgcgttcattcatcactgtttcttcaacacatcaccaactgcttgtgaggtcctgggctgggggctgggggaacttgtttctgaaaccctaagtgtgtttataaaagagcaggaatgtgcctgcctagggtgggagaggatggggctccccaaagtcatccagctccgtctgctctttgtccacgcaggtgtctcacatgctggttctgacagttgtttccatgatagaaggaatgcctggacgaaggaagcttttcccccttggagacatctaagcctgtcttgagggcccgaggcatttggctcagctccctctcccaatatgcatgttgcccaccagggacttcaaaatctgagtgggggcaatgctggctcccaggcccctcccaggaccccttctcatccaccccgacaaggttgagcagccggggatttgcagagccgcagggtctacaggcgaggaagacacccatgagcttcattagggcaaaggctttgctccctcttgaatcctggcacctgccacagttcttggaccagagctggctcaagaaatatttgtacaatgaattaattattaattaacaaaaggttatgcagaaatcatgactgaaacctaaaaatccatttacactgtgaggggtctactcacccacccaggaacactccacgtggaggggcactgtgggctccacagcagggagggagcacggaggccagcgaggccctcgcctggggtgcacaattgaagggggcccccaaagctcagtgacagagataactcatatttaaatgcaatatttgaagaaaaccaaatttaatgcaaacattcatgataacaaaatatccaaatttgccataaagacaggattagcgatagtgctgtagccgatattggaaccagaggcaaaaggaagaatcggtcactctggcccaaccccttgacttcccactgattttgtgcccaaggaaaaattgcacccacctagtcttggcactgctagaaaaagaaaccaggagggcagagaagaaaagaaaaccccaaacctcccttggcaacagatggcagagataaggggcttcttaaccccaaaggtggcgctggctaaaaacagggacacacaggggttcagcagaggccaaggtagatttagagctgggttgttaggggtgcttggggtgtattcatctgctttcgaattttaggtcatgggaggcactgaggccctctgtgcagtgagacccatcagctctgatagctgagccatcgccggatccgtgggacagttcccattctgtatcacagtgtagccccggataagtgcgtaggaagatgcttgggcagaggatgccaggaaccagcaccctgagtgggcctccctcccctctcagtacccctacctccaagctccctggcttttctaggctgcctggctatctcaaaccgtggaggcagagagctcctgggggtcattttagtccctgcagagaggaccgcatagggctctggcagtcactatggaggccactcgggaaacccacagtgtggccctccgttcccacccaagggtgtagcgcctcccagcacctgggtctgcgagtccttcccattggtgccatggtctttggtgttcctgggaactgctgtccatcagagcacgatgccgtggaattcgtgggaaccccagtcccaggatcctggagaactttctcacttagtgcaagagatcaaggccgggcgtggtggtgcacgcctggaatcccagcactttgggaggctgaagaaggtggatcacctgaggtcaggagttcgagaccagcctagccaacatggaaaaccctatctctactaaaaatacaaaaatcagccgggcgtggtggtgcgtgcctatagtcccagttaccggggaggctgaggctggagaatcacttgaacccgggaggcagaggttgcaatgagccgagattgccccattgcactccagccttgggtgacaagagcgaaactctgtctccaaaaaaaaaaaaaaagaggtcgagcacacagtcgggccacagccagaccctataggacaacagaactctggcccaccacctctgcagccatcctgccaagctggccaggacttgggcagggaccaccagcttccctaatttttgtccctgtttccaactcaggaccaaccagaaaaaagcaaatacgttcccctgaccaatcaaggcccgcttgtaaccagccgcacgccagcctccctgtgccaacagcctccaatcaggccctccggagcctcccctcctccacctgcctgagtccctccccagcgccagcctggtggctgactccttaccctagcgagctctgagtagacagcctctgcttgttctcatctgggaagtcttcatccatttccaggagaagatggagctgctgcggagaggccaccctcagacagggcaggcttagctactgtgggtttggacctgtttgttctcttctcaaagtcaagacaacgcagacattttgttgttgttgttcattctaattgcttggtctcagaccgtcctggcaaagccagcaagaggctttctaaaaccttccagcttcgtgccctgggcataaggagcctcgctgagggacagatgatgtcccagcactccctctctgagtgggctgaaatggcgtgctctgggggtcctgggtgccgggaccctgggtgggaagcaggggtgttccctccacccgggacagcatttcccaactcgccaagaaggatgatgggtgcttgctgagaggcaggatggcatcgtaggcaggagcccagatatggagccaaattgccgggtgtaatgagttgcttctgcatccattctgaatatacattctcaggccagaagcagggcacagtcaccctcaacccagcttccagttctcctcttcctcccagttcctcaaggcagttgatccagagacctgccttataccaccatctcctggtgactacctgcctggctaatttttgtatttttagtagagatggggtttcaccacattggccaggctggtcttgaactcctgacattgtgatccccccggcctcagcctcccaaagtgctgggattacaggcatgagctgccgtactcagctggaattagcaattcttttattattttttatttatttaatttttgagatggagtttcactcttgttgcccaggctggagtgcaatggtgccatctcagctcactgcaacctccgcctcccgggttcaagcgattcttctgcctcagcctcccgaagcaattttttaacaacaataatctgctcactggtttagctcagtggactcggtgttcaactgtgaaagagaagaacaaaattgaggaatgtgcacaaaaggctggaaagagagtgtcaaggttgtctaaaagctgcagtgaaattagtactttctagctttcagggtgaaaaaaattccatgtgaccatgtgactttattgttctacttggcagtacataaaatggagacaggtgataaaaataggtaaggctgattcacacccactgtatacaccaggactgttctaagagctttataaatattaactcactcaatcctcacaaccaccctaggagctaggtacgtctcttatgccccattcagaaaggaggagactgaggcataacagtagcacctggctcctagggtggttgtgaggattgaacgagttagtatttatcagctaagctgggatagctacgtgcagcctactggactcaccccactgatcccacaccccacacggactgtgcagtgaccacccttcagtcacagggtgaccccacagagctcgtgatgctccaaacccaccaatgggaactccctgtgggaaacttgccgggtaattcccatgaccccaataaagcctttggtccacagatccctctctcccctgcccccacccactgaatgagctctctgctgtctctggactgcccatcagtcctcctgggcatccaggaggtttattaggtattattactccaggacctgtgagtaatgaaccacttcagtgtcttcctgtcttccactgagctgccccccacccatcgcacctgaccggcgccccccaacctaactctgctcctggtcacggttctcctagaaagtggctctcttggccaatggatactctccagagagagatctcaaggccaagttagaagaaaatatgacagcagggtttgcatgctggcatgcccacttcttacagtgcaagctcacacagggcagcctcagtctcctcatctctgagtggggcataagagatgtacctagctcccagggtggttgtgacgattcagtgagttaatatttccaaagctctggccaggcgtggtggcttatgcctggaatcccagcactttgagaggccgaggcgggcagatcacctgaggtcaggagttcgagaccagcctgggcaacatggggaaaccccgtctctactaaaaatacgaaaattagctgggcatggtggtgtacgcctgtagtcccagctactcgggaggctgaggcacaagaattccttgaaccccggaggcgaaggttgcagtgggccaagatcacaccactgcactccagcctgggtgacagagcgagaccttgtctcaaaaaaaacaaacaaaaaaaaaccctatatatatacgtgtataatacgtgtatatatatatatatatatatatatatatatatatatatatatatatatacacacacacacacacacacacaaacacgcatatatatatgtgtgtgtgtatatatatatatatacatatatataaagctcttagaacagtcctggtgtacacagtgggtgctgaataagcctcacctattatggtcacctgcctccattttatatactgccaagtagaacaataaactcacatggtctcatggaatctttttcaccttgcaagctagaaagtactaatttcactgcagcttttagacagtgttgacactctcttcccagccttttgtgtgcattccttaattttgttcttctctttcacagttgaacacccagtccactgagctaaaccagtgagcacgttattgttgctaaagagttgctaattgtgacaagattactgatttcccagcttgtctgcattgtgtgaagtgtatgggactctggagccctccttccacgcctcctcctgccgaggtaactgggaaaatgagcccagtgagaaacttcttcctcctgttaagcttcatgggtggtgggtacctggctttctaaacaccattcgtcttttccattatcttttatctcgtcctcttgttctctcctcccggctcctttcagaaattcctcctgggcctgcccaagctctcccctgcaaatgcagagagatttcccctagccccagatgttaactgccctgaagtcttccctgtgtgtatcaatggttggttcagaaattctcatcttgcatgcatctttgtgtgtttgttgatgagaaaatcttgttaaaataaaaatgtggccgggcggggtggctcatgtctgtcatcccagcactttgggaggtcgagatgggtggatcacttgaggtcaggagttccagaccagcctggccaatatggtgaaaccctgtctccactaaaaatacaaaaattagtcagttgtcatggcaggcacctgtaatcccagctactcgggaggctgaggcaggagaatcacttgaacctgggaggcagagtttgcagtgagctagatcatgtcactgcactctagcctaggggacagagcaagaccctgtctcaaaaaaaaaaaaagtattcattgataaggacaactgtgaattcctttcaatagatgggtttacttcatttgttttcatccctgatggcaacacccccatccaacaggaaaaaagaaaccaactcatcattggcatccctcttctctgctttagtttttccttaggatgcaccgccctctaaagtattgtttaatttacttatttattatgttaatttattgtctgtatccctcattaaaagcaaagttccagatacttttcaaaagaagacgtacgtgtggccaacaagcatatgaaaaaaagctcaacatcactgatcattagagagaaacgcaaatcaaaaccacaacgaggtaccatctcacaccagtcagaatggctgttattgaaaagtcaaaaaacaacaggtgctggtgaggttgtggagaaaggggaacacttataccctgttggtgggaatgtaaatgagttcagtcattatggaaagccgcatggcaattcctcgaagagctaaaaacagaactaccattcaacctagcaatcccgttactgggtatatatccaaaggaatatacattgttctaccgtaaagacacatacacgcatatgtccattgcagcactattcacaatagcaaagacatggaatcaaccacagtgctcatcagtggtagactggataaagaacatgtgttacatatacactatggaatactatgcagccataaaaaagaatgagatcatgttccttgcagaaacatgggtggagctggaggccattatccttagcaaactaactcaggaacagaaaagcaaacgctgcacattttcacttataagtgggagctaaatgagggcacatggacacaaagagggggacaacagacactgcagcctacttgaaggtggtgggtggaaggagagagtggcttagaaaaagtaactattgggtactaggtttagttccatgggctacaacagcgctcagcatacagtgctcaggaaatactcatggaacccctcagttaatcatccagggtgcctggcctgtgctccagggacagtccgggaactgactgttctgggcctcgttgagtgtggaaattgagagcgagcgggtagaaacgctgacagccacttcactttgccatgttgtctaagtgcttcatcatttttctggtagttcatctttatcgtggtttacaaaagtgtgggtcccacgatggactggaaattaaaacaaaataaaaatgtgtccttaccagatagttagagaagtaccaggccagcaaacaaaaaaaaagtcgaaagaactgggacacaggaaaactacgcttctaagatttccaagccaagaacattggagagtgcagatgctgtgtgtggccaggcagcgttcagccacaaagaaaccccaggcagaagggccaggggggatgggggccaaggccttcttggaatctgccccatcctcatgcccctgcacgcacttgcctgggggaatgcggacagtcaccaaactgtgtccccgggaagggtgcctgccacaccaccccctgccctttgtgaacggggcatctctctaccactggccaaagctgctggcttcagatggaatttttttcttctatggggaaacctcagccagcagcttcagctcgtgcccaggagttccaggctgctcttcctgatggccaggcccatgaattctgatgtgtctagccagctcctacagccacagaagccagtttcctgcaataaatccacatatatatatcctatgtctcctgctggttctgtttctctggttaaatcttgacagatacagattgtgttagtaacgtgggccaatttttgacatggtcagactaccagaaacccatcgaaatctcaaacttctgtttatccaaatacagctgccaacagaactctcacagagtggcataagaagctccatttcctattttctgaatccttggcggttgagcatagtcctctgtgtgtacccagaacatgtcttctgctggtcctcggcagccgacagccaaagataggtccagagcctggcgaagttgatgccagtaacagcatccgggcctgcgtgtgggctggggaccctgcaaaggaccagaacctacgtctcggcatctttgtgaaaagggatgccaagacacaagaaaaaaggaaagagcaacacggcaaaacccatctctattaaaaatacaaaaaattagccaggcatggtggcgggcacctatagtcccagctacttgggaagttgaggcaggggaaccccttgaacctgggaggtggaggctgcagtgagccaagatcgcaccattgcaccccagcctgggccacagagcgagactcaggtctgaaaaaaaaaggaaagggaattcatggcctttctcttcctcttaagacaaatgcccttttcttcacattaacaatgaagagaccaacgtggcaagctggagagaagacgcaacacatcccagcaccagccgggccatgcaggaaagcctgggacaggaccacggccatcaactcagctctcaaacctgcctactacaggctagctcagtgtgcccggaaagggacctcatcactctgtgcctcggtgtccttgtctgtgaaataagttggccggattatctccaagctcctcctccggtatcctgtggttgaatccatgagacaccaaactctgcagcacgcaacagccttccagcgtggacacctgtgctgtcatcatgggagccttactccagttgtgttgtgctctcctcttgaattgtttgtttttgtttgggtttatttatttatttatttatttgagatggagttttgctcttgttgcccaggctggagtgcaatggtgcgactcagtcttccgagtagctaggattacaggcgtgcgccaccatgcctggctaattttcgtatttttggtagagacagggtttcaccatgttggctagactggtctcgaactcctgacctcaggtgatctacccgcctcggcctcccaaagtgctgagattataggcgtgagccaccacatccagcctcctctggaattgttggacaagctttgaggacctgtgagtctctagcccatgactgacctgtgcccatcttcttgctgacatctggccgggttatgaatgccacctctagacatgagccgaatgagtttaactcacccagagctccctgctccctgcaagagttgtcaagtttccgctttcacccacctgatgctgcctgtcaaactcgagcccccttccacgggctttccctgggtttgtctaactcacatgcaacctcagtacctggcactttacctctatctttgcccgggaaacactgggaaatgtttgccccatcagaagtcttgggaaaaagctgtcgatggccagtagggtttctttgacatggaaatcaattgcatgctgagaacagggaaacagctttttaaaaaccagcatggtgctcttccggcacccaaagtccacatagggcaacgattcaattatctacgtgtggtaggaggtgtctgaggccatgctcttcacccagccttttttattaacttgagaacctgcttctgcctctcacacaatttacgaaaacaacagccatgccagcgaccaagagttgggtcattcaagttacaccaaggaaccttaaaatggatggagctgtccatttgctttgaatgtgcacagatatttgacataaaccatgcaatgccgaggaaatcttcagctttccaaacataaggaacgagactccaggggcaggaataagagtgtgagcatgtgcaccctccacggggagctggctgggtccttccactggaagacgttggaaaatgatggaaaccaaatgccctagggacctcttgaaaaccaaaacaaagctaaaatgggatgggagggcagaactttcccttacagacggagctggatcttgtcacagagcctggagacagttcccagtttatatttccatgtgtgagtcactctcaggggcagaaaaacgcaggtgttgattaaactagggctgaaagaatggcaaacacagcccactctggggcccaaagcataaaagcggactcttccagctgcagagggtcatgcttctttgcgtgaagggatccaggggaaaaactcaaaccaagatctggaattgtcatttctgctctgtggctttacccggattggtctattcacttcacacctctaggagccttctccgtgcaactatttctaatctttgaggaggactcctctgagtctcccaaactcccaccacttcactggggagggaagcgatgatggggaaaactggagcagaaacacctgtggctgttctgtggcagcccgggtggaggagggacctctgggtttggcaatggtgagtttacctgcgacaccgcgaacgtggcaggccacgatggcagctggtggcatcaggattttcactcttcttcaagagcaaaatccgagttttttggccagctctggatcgctcaccatgggatttaaaggaagctgagcagcgaacacgggtgactcctaacgtggcttctcaggcatctgtggttgagctttgtgtgccagtgcctgccacaagccaggtgctgggcaggagccttctccgtgcgactatttctaatcttccaaccacccaccaaagaggcatggcgatccccatttaaggaggcgctggtaatcctcattttaggggaggcgctggtgatccccatttatttttttttttgagtcggagactcatgctgttacccaggctggagtgcagtggcacgaccttagctcaacctcccgggttggtagcttgaacctccacctcccgggttcaagcaactcttgtgcctcagcctcctgagtagctgggattacaggcgcccaccaccacgcccagcagccttcctttatattaggaaaaaaactgttataaatgggaaaaaatatcccagtgacaatagctacaaagacaataaaacgcgggaaataaacaatagtgcatccatgctttggaacattacacaatcttgcagatgcgtgcattaggccattatctattgtcccagagacacacataattaggatgctgtggtggctttgagtttcatgttgcttaagatagtttttttttcttttttgagacagggtctcactctgttacccaggctggagtgcagtggcatgaccacagctcactgcagcctcgacctcctgggctcaagtgatcctcccacctcagccttcccagtagctgggactacaggagcacaccactaggcccagctaatgttttgtactatttgtggagacggggttttgccatgttgcccaggctggtctcgaactcccggactcaagcaatcctcccaccttggcctcccaaagtgctgggattacaggcatgagtcaccatgcccagccttaagatagttttgatgattgtcaagattttcaagcaaggctaggcccaaaactacggagaaaccctcaatccatctggtctccatttgcatgtaggactgagagatctcagtaaccagcacctttcctctcctggatcaggcaaagaatcgcacgtgccagccacatcctccatatggctttctcaggctctgttctgcaattagaagataatcacatgcaaatacctcttgcagggtgtcacgagaaaggaaaccgttcctcctctggagaacgtgcccatcttgcgtcacacgcaaaaaagatgtctttgagtctcataacctttagagagtacatttcacaatgtcacgacgtacccttgcctgatgcgttgatatcatcttttctgtgtgtgtcaagaatctgtacaaagcatgaattatgtatttggtggtttaggctaagcagcctctgaaagccagaccgggtcatcgctgggatctctccatcgtgctcagcaagctggagatggaatccccattgatgaaagtcagataacctcattagcgggccccacctaatttcctttttttgatagcacttttgaaggtgcagtgactagatttcagggaggcttttaatcaaatgagaaacatgggctgaaaaataacgtatcctggaggaattgtagccaggtgaacaaccacaatgaggggctcttgtcagccatgcaggttgctggcagtggcttctgtgtgacgtggctgggactctgatatggtctggctgtgtccccacccaaatcttgtcttgaattgtagctcccataattcccacatgttgcgggagggacctggtgggagatcactgaattgtgggggcgatttgccccatactgttctcatggtagtaaataagtctcaagagatctgatgatttgacaaggggtttcccctttctcttggctctcattctctcttgtcttccgccatgtaagacgtgcccttcaccttccgccaagattatgggccctccccagccacatggaactgtgagtccatcaagcctctttttctttataaattactcagtctcgggtatgtctttatcagcagcatgagaacaaaccaatacagattccacattctgagtctcgtgtggttgaggttctcgctactggagaagggaggacaacgtgcccccttgatatggtttggatctctgttcgcaccaaatctcatgtcaaactgtaatccctggggtttgaggtggggcctggtgggaggtatttggaggtgactggggccagagttctcatgaatgggttagcaccatccccctgggtgctgttctcccaatagtgagtgagttctcgtgagatctggttgttcaaaagtgtgtagcactggctgggcacagtggctcacgcctgtaatcccagcactttgggaggccgaggtgggcagatcactcgaggtcaggagttcaagaccagcctggccaacatggcgaaaccctgtctccactaaaaatacaaaaattagctgggcatggtggtgggtgcctgtaatcccagctactcaggaggctgaggcagaagaattgcttgaacctgggaggtggaggttgcaatgagctaagatcatgccactgtactccagcctgtgcaagagacactgtttccaaaaaaaaaaaaaaaaaaagtatgtaaaaaagtgtgtagcacctccctcgtctctctctttctcctgctcctgccatgtaagacacctatgcctgctctgccttccgccatgattgaaagctccctgaggcctccccagaagcagataccaccatgcttcctatacctgagagcctgcagaaccatgcaccaatgaaacctcatttctttttatttattatttttttttgagatggagtttcgctcttgtcacccagggtggagtacaatggctcaatctcggctcactgcaacctctgcctccaagttcatgtgattctcctgcctcagcctccctagtagctgggattacaggtgcccaccaccatgctcagctaattttttaaaaaatatttttagtagagatggggtttcaccatattggccaggctggtctcaaactcctgacgtcaagtgatccacctgccttggcctcccaaagtgctgggattacagaagtgagccactgcacccggccagcctcatttctttataaatcacccaggctcaggcatttctttctagcagtgtgggaagggactaacacacccctcctagtaggaagagaaaacagaggcctgtgtgtgggcctccccagcccctacccatgtctttcccctgctggtcctattgtgtatcctctcaccgtactgggcctcggctgcgagtaaaccacacgctgtgtcccatgagcccttccggtccatcactgagtgtgtggctggccttggggagcccccaccccaaaccacctgctgtaggaggaaatcgcatacacgtccaaaggaccataaggtctggctcatgtgcaagaaccaggagcgcatgtggggagcgggtcttgagggtgtgggaccagcggtcgggagagaaggctcagtcggggagaatttaccagcatgcaatcacggtcctgtgatctgaggtggagtggcctgaggccctgaaaccttcttcctacactgcctgggtggctcctggaggctttcatattatgaagacctacagtaaattaggagaggctggaactgccttggcaaagcattgaggtaggggtcagaaggccccggaaggggcaaaaccggacgacttcgccaagtccagggaaaggcaagccggatgattttgccatgtccagggaaggggaagccagacgacttctccacgtccagagaaggagaagccagacgacttcgccaagtgagatttgagaacgcagccctgaccattgtccctaagaaggtccagaggacccctctggctgaagcattagaggggcactggtgcatctggggtgctcgagggatactgtcctccacagcctcctgagtgtcaacagagatgacaagactacagggtggagagggcagggggtggccctgcactgccagtggctaagggggcatgattattataatgacagaaaggcccagtgccctttgggatgagcatggtgacttaatctgtatccctaaaagggaaatacagagctggtgaaccaaaggctggtatcagccaccgcaatgaaaaagcatcttcagtcaatttcatagccccagagcccatccgtacacgaggatcccaggcctccttaagaaagagccccacagtggccctgcaagtatatttgatagagtccctcaatttttttttttttaacatagagacaaggtctcactatgttgcccaggctggtcttagactcctgggttcaagtgatcctcctgcctcagcctcccaaagtgcagggattacaggtgtgagccattgcacctggccgagtcccttaacctctccctaaaggaacctacggacatgtgtcagagtatacgctgggaaaagggaggatgcagacatttcagggctgttggatccacggtctgagttgacactgacaccaagaggcctcaaatgctgccgattcttgccagctagggggctctgtgatgggccagaagtaacgggagggcagagcgggtctgagcggcgcatgggttggactgtactgggagccccttcccctccttcatgtcctctgggtccagcaacaagcttcgtgtcatggtagctgacggtgctttgcctcccccactctgtgtccccgcagtaggacttctccgaagacacggggaggggcagcttgtgcaggcacaggcctagaagttcaagggcattgatcccaacttgaagacattacaaaaacgggtgagaaatgtctcggtgtgcacaccctaacacgtcagcctgaagatgggctgtgaaaggtgaataaaacacagcttccggtgcacagaaatcgagtcagctgttaacttcaggttttgtttgcttatatcttattttatttgctattttaaggtatttctggagaagacctaaaggacagggaactactgtcttgcaatcctaaggagaaactccagaagccagagctggcttgcagcttagaagaaaactttcctcccatggaattgtgtcccttggcagtcctcataacgcccaggaatgacaaaaatctcagaatgacatcttgctggaaaggatgcagcgaatgtggcctagaaatataaattcacattacagatgatttcagaaccctggcttaggcctgaaaaggacccatgaggcctgatgggggcaggcctaggggctttgtcaacaggacagtgtcctaattttctaggccatctttatgaagtctccagctgtcagtccacatggcccgctgtgtccctacaaagctatgagagacaacaggactaatccgccagccctcttctttggtgccatggcaggaagccacactcaccagcaaagctgaccccaatctgaacctgcagacatgcagctcccgggcacacacccacacaaatgtccctgggatcagatcgctgtgcaaagacagcatagcccacaccatcttgttggcaaatgagaatgtagatgagagggccacacaacctggctgactgtgttggatgatatcggagacggtgggcaaagccagcctgctgggctgccccatctgccttgcccagggcaggaagaggtttttcagactttgcccatgagtatgttaccagcagcaaatctgcacgggtcagcagcaactccatccttgcctcctcagtggaaagaatctggagcagaagtaggtttaaggtagagggagagattgaggcacgttttagaacaggagtgagggtttatgaaaaagttttagagcaggagtgaaaggaagttaaagtatacttggaagagggctgagtgcgccacgtgagagatccaagtgaccgctcagccctgggcgtggggtttatccgttggcacggctctggagttttctcttctcctccctcggttcttcccttggggcgggctgttgctcaacagccccatgcagcagtgttggtcagcactcaggagggtaattgcatgtgtagtgagttgactgaggttgtgcgcatgctctctaggggcggttttcctttactggttgaatgcccccagaggaagttcatacatccgccattttgcctcttagtgcgcacgcttgagcccactcgcccaactcgagagcttatcgggaagctgctgatcaccagtttcaggtgtttttttatttattgggagaccatcttcccctggtgtgagctgcaaccaatgatcatttcagagagacagtttaacaactgcctgaccatcacctgatggtcacctgacattcctgggctggtgggcgccactcatgtctgcctaacttcctcctctaacaagcagagccatggaatgaagacaggcagctcaggcagggtcggccagcctgcacccagggcttccaaggcatcttctattccagggaggcagcgttctccccaacctccgccaagccagcatccagggatgtcacctcaataaaggaggcctcccagcctgcactaggcacctccagctcctttctgtaggccccaggagcctgtgacatagagcaaaatgtcacagtcattgaaggctctgtgtgcaagtaacaagtctcccattcagagaactgctccctcatcaagctctcctggcagcccccaccagcatgctctcttcccgtttaaccccagcagccccgcaactcatgcttccagtctggtcctagctcatctccagagcagcgatcaatatccataaagagctccctacttggagtgctgggccagctctttgcccagggagggagtggaagtctaggttgatcataaagaagtcaacccaccctgaagtcaccataaacctaacaggggccttccttaaggtatccgtgactattttacatatgccttgagttttatagtagaaaacaatcaggtgggctaaagagtgtgtgcaggctcatgtgcatccagctctggttggttggaactatcatgcccaccccagtgaatccactggaccacttcgttgcctgacagccagtgacgtatttggtcacgtgcagccacgttgcctttaggtggcagtgccactggagagctcctcacatctccctgtctcccccagcagtgcaagggtgtgcagggattcaagtatttaattattaaattaaatcaaagccttgaggactgtgtgttttattgggggaaaaggctcaaaccaaacttcaataatattgttaaagttttcagcaggattttgtcagaaaagtgaagtatgagaaatatggtaacgtttagccttgtgggaataaaatcacttgagaaatacgcctgtgcatcaaagggcattatcaagacagtgaaaaggctacccacagagttggagaaaacgtttgcaaatcatctctctgataaggatctagcatctggaatataaaggaattcttacaagtcaatagcaaagacgaacaacccaattttaaaatgatcgaaggacctaatagatatttctccaaaggagatctataaatggccaataagcacatgaaaagatgttcaacatcaccagtcattaagaaaatgcaaatcagaacaacaatgagataccactttacaacctctagggtaactacaatttaaaaaaagaaaactgaaaataacaagagttggtgaggatgtggagaaattaggacgctcatacattgctggtgggaatgaaaaatggtgcagctgctatgaaaaacagtttggttgttccttaaaaagttaaacatagaattaccgtatgacccagcaattccgctcctaggtatacacccaaaagaactgaaaactggtactcaaaaactggtacacatatactcatagcatcattatttatagtcactaaaagatggaagcaacccaggtgtccatcaacagacggatggataaacaaagtgtggtctattcatacacatgaacattattcattcttaaaacatcccggccaggcacagtggctcacgcctgtaatctcagcactttgggaggcagaggcgggtggatcacctgaggtcaggagtttgagaccagtctggccaacatggtgaaatcccatctctactaaaaatataaaaaaattagccaggcgtggtggcggacgcctgtaatccccgctactcaggaggctgaggcaggagaatcgcttgaacctgggaggcggaggttgcagtgagccgagattgtaccattgcactccagcctgggtgatggagcaagactccatctcaaaaacaaaaaagcaaaaaaagtcctgaagcagtgatacacgtgacaacatagatgaaccttgaaaatgttatgcttagtgcgagaaactgggcacaaaaggccacatattatacaattccatgtacatgaaacacccagaataggtgatccatggacagaaagcagatgagcggcagccagggactgtggggaggcagaatgaggagagactgttcatggggtcagggtttccttttgtttcgcaggctcagggtttccttctgtttttgtttttagagacagggtctcgctctgttgcccaggctggagtgcagtggcacgatcacggctcactgcaacctcgacctcctgggctcaagtgatcctcccacctcagcctcccgagcagctgggacctgactggctgggaccacaggcacgcaccaccatgcccagcttggggtttcctcttggggtgagggaaatgtgttacaagtaggtagagatggtggctggaaaaccttgtgtaagtactaattgctgctgaattcttcattttgaaatggttagttttatgttatgtgaatttcagctcaggaaaaaaaaattccaaaagcaaaaaagaaaataaacgtaagtcggcgattcagtttccacccactcaacccacagatgtattgtcaggaaagcattgcctcaaaagccagaggctgccggcacacactcaggaccagtccagaggcaccaagggccactgtggcgagccggggtgcccagaggctggggaacggtggagggccgtgtcccaggagtcggcagagcagaaagggaggctgagggcgatttgggcaccgctgctgcagcccctggtactgatggagaaaggatctggaaagtggggcagtgcggggggctcctcttaccgggtttcccactgcagactgagcccaggagacctcaatcccaggggaaaaggaccagaattctcttctgagggaacagaacacacagattcagcagcagcaggagtgacagggccctgccgggagtgagaggcccagctcctcccgcctgcgctgccccggctgatggcgctggattcctcgagccacacctgtcaaagcagggctgaacctaacggctgcccaggtctagtcccttctcaaacatgccacttccgtgtcctgaagcacaggtctgcggcggacctccccaggccaggatgccccgttgttggagtcactgagttctactgatgtggctctcctgctgccgtggctgcagacggagggatgccacagccccccctgcagtgaccaggcacaggagaacatggccccagagccaccacgggagtgtgtcttgtctaaactgactcagaaactctgctccctgagcggctcagtgacacaaacaccctcctctccctgcatttcacaggcagtgaggcacgcggcctctatctactacatctgcctgctggatgtctcttgtgttccgtggtccgtgccacccccaggctgcacctgcctagtgcagttccgaagctcctcctgggtctgcttctggccatcctctgacaagcacagacaggtttcaatggaacgcaaacacccacctgcccccgacatctgcagaggtgcgcctgtgccatggtgacgtccgaggtatcagaacgagaccccataaaaataaatatgttacccagagacagcaacacttacaaaaaagggtcagtgtgcatcactgatgaccatttaacccgaagcagatccaggtggaataggcccccatgcccagctgtcagggccgctgccagaccaggcaagtacccaagaaagaagggaggggctcaagaaaggtgcaatgcgtgggattctgctgcaaagaggcgccgggaggagctgcagggaggcccccacaggaagggagagcacgggaggtgggtctcggcacccgtcggggcatggccccttcttcccctcactggggtgccacatgcccgcccggggtctgcaggaagcgaggggtactgtcctccgattagatggtcagcctgggccttgccgtgtggctttcctatgatgcccatgaaggcagtcccaggaccacactgcggaccctgaggaggtaccaaaaagggagggaaatgccccccatgcccacacatcggggccactgccctacacgggttccacaattctcagtacctttctccaccacaggcctttgctggccaagccttgatggagaggggctccacgtcagtgtggaacctgacgatgcccagcctcgctgtctgaaaggaggggacactctctctgtacctttgtcttgctgggtcagtgaggcagggaagatggcaggcggccaagagccagcaccaccctggcaggggggacaggccctgtcctaggacccagagacagccacatcgacgcttgcgccttcgtttccttactggatgatctccaagcctctgacacccttgggattctctcaacgagatatctcttccctcccagagctcacacactttgtacgccttcttcctcccagggtcccattctggtagtgaacaagcatcgtttgcggtatccctggactcacacctcctgaggacacctggatttttttaaaggctacaacataggtggaccttaaaaacattatgctaaatgtcaatgcatttgaggacacggccacgcataggagtgtcatctttgcacaaaagcccaaggtcatgatccacccttcataggcctaactcaagtgctgtcttcctagtgtcaaccatggatgtcacatacttccatgctgtgcccgatgggctcagtgacataaacatcctcctctccctgcatttcacaggcggtgaggcacgcggcctctatctgctgcatctgactcctggatgcctcttgtgttctgtggtccgtgccacccccaggctgcacctgccccgtgcagttccgaagctcctcctgggtctgcttctggccatcctctgacaagcacagacaggtttcaatggaatgcaaatacccacctgcccccgacatctgcagaggcgcatctaggcctgagaggctgggccaggctgcttcaggctccacgcgttatcctgggggcttccaaatgtttccactgtgcctcgccttttggtatgagatttacatggctgataagcccagggattacccagcggcattaggggctggggacttgaggagacaggttgcaggtgattccagctgaagccaccccagcctggcccaaattttgatccaggacacaccagaatggcacatctcagacgagttctgccacccaacaaccaaactcccaggctcaggctgggcactgtcctctcttggtaaatccccatccctgtcacatacagggatgagtctccatctctgaactccactccgtatccaacacttacctccgtctttgtccaggaaatgctgggaaattcctgctccttcaaaaggtacagaaaaaacctgatttccaagtaggtgtttgtctcatggaagtcaatagcatgtcctgcactggggatggctctgaaaaaaaaaaaaaaaaaaaaaagcaagtttccatgtgcctgtaacccaaggcatgggcatcctggaatctctcatggtgtcataaacacaatatccaagtatgcacccaagagaaatgaaaacatatgtccacgcagagttctacactgcaacgttcagcgttattcacagtagccaaaaggtgggaaccacccaaatgcccatcaacagatgcacagataaacaaaatgtggccattactcagcctttaaacgagtgaagttcttatacatgttacaatttgcataaacctgaaaaacattatttgcataagccttgaaaacattatgtaagtgaaagaagtcagacacaaaaagccacatagtacgtgattccttttagaggctgtacccagaataggcaaatctgtagagccggaaagcggattagccgttagcaggggataggagaggggaggaagcgggagtggttacagtcatcccttgctgtccttgagggatgggttccaagtcccctaaggatgccaaaggccacagttgctcaagtccctgatgtatgcatagtattttcttataacctatgcacatcctcccacacactttaaatcacgtcgaggttacttaccatgcctaatacagtgtaagtgctatgtaaatagttgttacacagtatttttttaactttttcatcacctcataaaaacaccctgttccagctgggcgtggtggctcatgcctgtaatcccggcactttgggaggctgaggtgggcggatcacttgagatcaggagttcaagaccagcctggccaacatggccaggtacagttatttttttcctaatattttcaatccacagttggctgaatccatggatgtagaacccgtggacaccaagggccggctgtacttaatgggaacagggtgtttttatgtttttattattttttgagatggagtctcgctctgtcacccaggctagagtagagcggctcgatctcagctcactgtaacctctgcctcccgggttccagcaattctcctgcctcagccttctgagtagctgggattacagttgcatgccaccacgcccgcctagtttttgtatttgtagtagagacggggtttcaccatgttggccaggctggtcttgaactcctgatttcaagtgatctgcccaccttggcctcccaaagtgctgggattacaggcatgagccaccacgcccagctggaacagagtgtttttatgaggtgatgaaaaagttttgaaactagaaaagagctggtggctgtacgacattgtgaatacaccaaatgacatggaatcgtgtacttaacaatggttcatttatgtgaatttcctctcagttaagaaaaccgacgctacccgaggatcttctcccaccttccactgcccgccagccaagacttcaagttcactgtcctccttccaaaaccctacagggctcctgcactctgccatgcactgagctgagcttaggacggggacgggtacccgatggggtatcttggaggaaaacatcatcatcgggtctgcaaacagaggcaggtaggtgtgcattgtgccggatgctgcggaggacatgaacagtggccatgcagagaagcagggggctccttcgctggagttgggggctggactttccaggagccccctgggggaacagcagccaggggcctgggcagagggaaatgcaggcatgagctctgaggtttcaggacagaaaagcccaaggcagggctgctccctgcatgagtcaaccatccctgcagtaggctatgcccccaaaaaatcatgtccgtacacttaaaatgttaagatggcagattttatgctacatatattttaccacaattttaagaaattcatgatatactcaaacccattgaattgtacactttaaatgggtgaattacgtggtatgtaaattatgtcaataaagttatttatttttatttttattttttgagacagtcttgctctgtcgcccaggctggagtgcagtggcatgaacttggctcactgcaagctccacctcccaggttcacgccattctcctgccttagcctccccagtagctgggactacaggcgcccgccaccatgtctggctaatttttttgtatttttagtagagatggggtttcaccatgttagccgggatggtcttgatgatctcctgacctcataatccacctgcctcggcctcccaaagtgctgggattacaggcatgagccaccgcaccaggcctaaagccattttttttttaaaagctatgtctaagccctaaccccagcccctgtgaatgtgaatccttggaaaaacgattcaccaagtcctaactcctagtacctgtgaatccttggaaaaaggacctttgccgatgtaattaagttaaggattttgagatgagattatatgagattagggcatgccccatatccagtgactggtgtccttatcagagaaaggcagagggagacttgagacacaggcccagaggagaagttcatgtgagatggagcagagactggagtgacgccgccacataccaaggaacacctggggccaccggaagctggaagaggcaggtaggaccctcgctgggagccttcggagagagagtagccctactgacacctggatcctgggcttctgacctccaggacgcgagagaatcagctgctgttgctttcagctgcccaatgcatgaacatttgttccaggagccccaggaagccgaccccatcagaacgccaaggaccggggtggagagtcccaccgtgtctgagcagagagtctgagtgctcatagaatgggaagacgctgccctgtatcaagccagggacctgatgggggctggagagcgggcttggacatgtgcctgctgccatcggagccgtctggggccaccacccagaggacaatgttaaggatgaaaattcagggcctccaattacacagaaatcaacatagccatgaaatgataaggacaccgcagcttcctcttttaagaagacacaaggcagccgggcgcagtggctcacgcctgtaatcccagcactttgggaggctgaggcgggcagatcacctgaagtcaggagttcgagaccagcctggctaacatggagaaaccccctaaaaatgcaaaactatctgggtgtggtggcacgtgcctgtaaccccagctattcaggaggccgaggcaggagattcactcgaacccgggaggtggaggttgtggtgagcggagatcatgccattacactccagcctgggcgacaagagcgaaactctatctcaaaaaaaaaaaaaaaaaaaaaaagacgacacaaggcagttccaggggcagagatttggaatattttgaataaagggggaaaaggtaagaagatactacacaatgagggctttagaagaatagtaagaatttttgaggctgcgtgcaatggctcacacctgtaatcccagcactttgggaggtcgaggtggtggattattcgagcttgggcaacatagcaagacctcatctctactaaaggttttttaaaaaattagccgggtatggtagcacatacctgtagtcccagctactgaggaggctgaggtgggaggatcacctaagcctgtgagttcgaggctgcagtgagccaagatcatgccactgaactccagcctgggcaacagaacgagagcctgtctcaaaaaaaaaaaaaaaaaaaaaaaaaaaaaaagtaagaatttttggaattcaaatgtgaatttttaatctttttaattttacgaatcatagagaaaagaatctgaatgaagatctggaaatacaatttccagtctctggctttgcttggcctgatcatttccaaacaaaccttaagacttgctgttttgcccaaattcttccctagtctaatcgtcaggcagatgtgaccgtggggaactggctgtccccgcatcagcagcaggcagcggcattacctgaggtatttccttcctggcagttgatcatagaagttcatggttccatctgtgctaaagaattcatccccagatccgaaaaccaagagctctggtttggtctgataatgtgtcatatggtcttcagaagaaagcagaacaatcggtcattccaaaggtcatttggaagaaccaaggtcattcagcttctagttgtgagtggaggctgcagagggaccctaggaggcgtgggaccctagaggaaccccagggatgagtgggtgtggaaggggcgccctggtcagtcaatagtcaacacaagagcactattctagtcacaagtgggcccaggaggcgttgagactggtggccgggggcgcctgctctcctgcccaccaaccaggtgacctgttcaagccactgaacctgcctgggccttagtcccacagcgctggggtggaggcaacaggcgtcgctgactctgggttattggggtggcggggttagatcaactgccaacctggcgaacgccctgggaccacgcatggctggtaaggaactctagaggggatttttcatccttattattatgaccggcgcccctccatgctgagtgatgtgctgagactgtgcacgccaccctctgcccccttcatttcaaaaatgcagaacggaggctgcagggggccacctgcccagtgtgcacagctcatgaatgaccggatgaggtgacaccaccatctgtcaccccagggccaggcctctgtcctccccagaaacttgtcctcgcccactccacctgcaagtcctctaggggctgagcactacacaggaacacgtgcagattccagcacccagaggtccttcacacctagccacagggcctctggcagcctcggccatcctctctgcgtgcctgaggcggctgcgctgagcagtgggggacccaggaaaggtcacggctcccccagcacatctgacacacctcccgccgggccagctgctggcttcagcaagcagacgtccccttcctatggaaaagcccatgaaagctgatttgaaatatctgagcagctgtttgaaggacgtggatcagccctgttcagcggcctgagcggagagcggggccagaggtacaagcctgggacggcccgcaggctctgggagacacaagtcttctcagacttaggcctcatgggaccccaggggcctggtcagctgggttccccaagggctcacccacagagagcctccgttctcagtgtcgctgtggatgaccaacactaaaacccccaagcccagaccgcacctcgttcccgctcacctcggaatccctggagaaatcagacatcagccctttaaaagttccccagtgactttaacgtgcaacccaggtggggcgtcactaggccaggtgtcacccatgtgtgcccccaactggaggccctcagtgggcttgttcgagggcctccaggctggatgttcgccccagatggcccagatggcctattttgtgcattgtctggctgtgtggaaacagaacagcaccatagtgacatctagcccggatgtgggcatggcccaccgaccactgaccgcctacgtcgttcttccaccccgagcgcccgcatatcccgttccgttcacctcccactggggtcaacactcccttcacagcctccatcttccccggggcagtcccattgctttggagacttcaaaaaattgtactcacaaaaggggtcgacatgttctatcttctcctggaagcggggtgtgtccttgttcccagtgacattcagcgtgtgcagggcccgtacgcatgcactctggcctccaaagcacctgtcgttgtggagattccacagcaggcagggtggagatggtgagccgcagacatcacacctgccccaggtcaggccgaggctgctcatcaggagccccgagacctcgaatgcaacgtcttcagatcccaattccctccctgcatggagcagaacagtgtctctcaaaaactcacgcccacgagaagtctcagaatgtggcttttagtagaaatagggtctctgcagatgtctttcattaagctgaggccatattgagtgagggtggatcccaatccagtaactggggtctgtataaggagagagaacagaggcacatgaacggaaggtcaagcgacaacgggtgcagggatggcagccaggcagccacaagccaaaggacgcccaggatggccagcagccctggaagccgggaaagacaagggaggctcttcccctacagcctgcagagggagcaggtcattatctgttaatatcttgatgttgcagtttggcctccagaactgtgagaaatgtgatgttgtttgatgccacccagtttgtgttcctctattacagcagccccggagactagtaagtgggtccctggcagaggaaggggacagagcgtcgaattctcctccccgcagggagccacctgggctccgagaaacccttgcaccggccagaggccatgacactaatgctggaatgttctctgtgagcgatgaagctttcaaccagactccgctagagaaaaatacccgacagaactgtttacccgattaaatgaaattaaattcagttttcttgttgccaagcagaaatgaggccctgtcataggaatgtctgagcagttataaaaataggagttcatgtttgcacatagctggttgaaaacagaaaattcacacctgctctaagagataaacaatgcacagctgagcgttgaactcacacaaacgagccaccatgcactgcagaacagaaacagaagaagacttaagaaaaaagccaagataaatgatcacagccaggcacggtggctcatgcctgtaatcccagcactttgggaggttgaagcaggcagatcatttgaggtcaggagttcaagaccagcctgaccaacatggtgaaatcccatctctacaaacaaacaaagaaacaaacaaagaaacaaacaaaaaattagctgggtgtggtggcaggtgcctgtaatctcagctactcaggaggctgaggcaggagaatcacttgaacctgggaggcagaggttgcagtgagtggagatcacaccactggactccagcctgggtgacagagtgagactccatctcaaaaaaaaaaaaaaaaaagatccttcctccccaattccaacaccccccaggaaaactcagtctacaattgaatataaagcaaagaactggctgtttgaaaagttcatcaaaacgtgcaaatgtctggcaagataaataaagaaaaaccacaaacataaaccacgccagcctgggcaaaagagtgagaagagaagaggggagaagaggggagaagaggggaggggagaagaggagagaagaggggaggggaggggagaagaggagagaagaggggaggggaggggagaagaggggaagggagaagagaggggaggggaggggagaacgggaggggaggggaggggagaagaggggagaagaggggaggggaggaaagaaagagagagaaaaggagtgagggagggagggaaggaaggaaggaaaccaaaggccagaggagagcctggagggggtcctgctcacagcctcagaagggatcaaccctgcagacacctggatatcagactttggcctccagaactgtaagatggtacctttctgttgttaaagccaggggtcctcaacccctggggccacagacagtgccctgtctgggccacacaacaggaagtgagcaaacgaagcttcatctgtatttgcagccactcctcatcactcatgttaccgcagaactccgcctcctgtcagatcagtggtggcatttgattctcagaggagcacgaacggtattgtaaactgcgcatgcgagggatctaggttgtgggctttttttttttttttttttttttttttttgagacacagtctcgctctgtcgcccaggctggagtgcagtggcgcaatctcggctcactgcaagccccgcctcccgggttcacgccattctcctgcctcagcctcctgagtagctgggactacaggtgcccaccaccatgcctggctaatttttttgtatttttagtagagacagggtttcaccgtgttagccaggatggtctcgatctcctgacctcgtgatctgccctcctgggcctccgaaagtgctgggattacaggcgtgagcctccgagcccagcccctgagccaccgcgcccagcggttgtggacttcttatgagaatctaatgcctgatgacctgtcaccatctccatcacccccagatgggtctgtctagttgcaggaaaacaagctcagggctcccactgattcttcatgatagcgcagttgtataaggatttcattatatattacaatgtaatgataataaagtacacaatcaatgtaatgtgcttgaatcatcctgaaaccatcccccacccctgcccccatccatggaaaaaattttcttccacaaaactcatccctggtgccaaaaaggttggggactgctggtttgagccaaaaacaaaaatcaaaaaaacaaaaacaggctgggcacggtgggcggctcacacctgtaatgccagcacttggggaggccaaggcgggcaggtcacttgagcccaggagtttgagaccaccctgggcaacatggcaaagccccgtctctactaaaaatacaaaaattagcagggcgtggtggcaggcacctgtaatctcagctacttgggaggctgaggcacgagaatcacttgaacccaggaaacggaggttgcagtgagctgagatcacgccactgcactccagcctgagcgacagagagagactgtctcaaaaacaaaaacaaacttctccccctctcccttccccccagaggtcgccaggccaacaccattttaccgattctgacaaaccttccatgaatatataatttccatgttatttaaattactacagaacccctgaagagattattttatctttttttttatagagatggggtctcactatattgcccaggccagtctcaaactcctggcctctggcaattctcccgcctcggcctcccaaagtgctgggattacaggcaagaggttatttttataaagtgaaggttttcctaggttattttataaaagtgaaggctttgctagcaaagactgaccaaagtagtcaaggaaaatgagagatcaatgtctcacgggaaatgagagattcaagaacccaaatcaaccatcagcaagtgggcagtaactgtccctattaaaaatgatccttaggaggctgggtgcggtggctcacacctgtaatcccagcattttgggaggccaaggtgggaagattgcttgagcccaggaatttgagaccagcctgggcaacatggtgaaaccctctctctaaaaaaataaaagtgatcccggccaggtatggtggctcacacctgtaatcccagcactttgggaggctgaggcaggtggatcatgaggtcaggagatcgagaccatcctggctaacacagtgaaaccccatctctactaaaaatacaaaaaaattagctgggcatggtggcggtgcctgtaatcccagctacttgggaggctgaggcaggagaatggtgtgaacccaggaggcagagcttgcagtgagccaagatcacgccactgcactccagcctgggcaacagagtgagactccatctcaaaaaaaaaaaaaaaatcccatgactcagtaggcttgattccagaacataagtttggttcaaattaagatatttacccacataaattgttatatgaataaactaaaagtgagagaccatttgaacatttcagtaacatttcaatagctactgaaaggcacttgataacatttagaaaatgttctcactaaaaaaagaaatccttagcaaaccagaaaaacaatgaaacctgcttaatgttataaaatgtatgtacatattgaaaccaaaagccaaaggcactatcatcttgagggatgaaattccagaggccttcctggaagaggcactgccgtcttgaagtcctgtatcctatgcccaaggccagggccagagggtgtaaatgctgaagaagaagggataaacatgttcctgttggccaatgacatgattaacgaggaaatctagcctacgtaactaaaaaattaccaaacggatgagtatttacacatatgtatcagtagtaaccatttagaaaacacaaacttttaaactttccatttcaaatagctactaaaagtaaaaagaattttcaaataaactcaacaaataacaatgcttggagtagaaaactgcagtaattccctggaggacaaggtacctgaacaaaaggagagatattttgtgttcctgggtaggaaaaatgtaatcatacaaaacatgccaattcttccatatacaatacagacccaatcagaattacgttgcgttgttttctgtttatttgttttaacttaagttgaatttcaaagtacacttggaagaatgcttgaaagaaaattagccaaacatttttaaaaagaagaatgttcaggaaacctttctctatcagatataaaaacaggccgggcacagtagctcatgcctatagtcccagctacttgggaggctgaggtagaagcattgcatgaactcaagagttcaaggttgcaatgagctatgattgtgccgctgcactccagcctgggagacagaacaagacgctgcctcaaagaagaaaatgtacagtaagctcttgttattaaaactatatggcagtgaccaaagcatagacaaatgatcagtggaagaaaactgaagttcagaaaaagacccaggtaggctgggcgtggtggcgggcacctgtaatcccagctctttgggaggccgaggtgggcacatcacgaggtcaggaggtcgagaccatcctggctaacatagtgaaaccccgtctccactaaaaatacaaaaaattagccgggcgtggtggcgggcgcctgtagtcccagctactcaggaggctgaggcaggagaatggcgtgaacccaggagatggagcttgcagtgagccgagatcgtgccactgcactccagcctgggcgacggagtgagactctgtctcaaaaaaaaaaaaaaaaaaaggatccaggtatgtctgagaatttagcacatgacaaatataatattggaaagcatggggggatttacacaatacacagtgttgaaatgattcggaaaaaataaaactaaatagctatcttacttgatacaaaaagttagaaatagaatgtctatattacttcctttgagatggagtcttgctctgtcacctaggctggggtgcagtggcacaacctcagcccactgcagcctccacctcccgggttcaagggattctcctgcctcagcctcccgagtagttgggattacagttatagccaccatgcccggataatttttgtgtttttagtagagacacggtttcaccacattggccaggctggtctcgaattcctgacctcaagcgatccacccgcctcagcctcccaaagtgctgggattacaggcgtgagccaccgcacctggcccacaaccaaaaacttaaaaacctggctgtttacaaaatgaagacattatgccaatcaaaaccagccaaacatgaaagaccaaatattgccggattccatttatatgaggtataaattgaccacctagaggagtcaaattcgtagagacagaaagtagattagcgattaccagaggccggggcagggcggatggggagtgagtgtttcgtgggtgtggagtttcagtttgggatagaagaagttctgcaggtggatggtggcggcagctgcacaacaacgtgaatggactgaatgcccaggatagtgcacttaaaatggtaaaagtggccaattttatgttatgtatattttaacagaattgtttaaacctggctgctgatttatattgagataaattctacttatttatattaaaaactgtcatatttatttttttgactaagttttcagaataaattacataaaataagtgaaatcactggattcaattactggcccgggagacaatggcgggccacactacccaaggacgccttgaggttcgagatttgccctaataaatttcctgtttggtgaaaaagctaaacaggtgagtaggcacagggtgaagaaatgcaagtgaagatgagaggggaggaaatatgccaaagtgaagaaatatactaaacagtgcttttggatgataatctaggaacaatctaggaactccagctctcatcttgatgtagtttaaccaataacttggttttggagccaaggtaatgactcaatcatccacggcagccaggagccaagctgtcaaccctcattgcaaaaaaagcacagaaaaccaaatatcaagcgtggcctcaaaaagaatgagggggctgggcgtggtggctcatgcctgtaatcccagcactttgggaggccgaggcaggtggatcacgaggtcaggatttcaagaccagcctggccaatatggtgaaaccccacctctgctaaaaacacaaaaattagctggcatggtggcgcgcacctgtagtcccagctcctcaggaagctgaggcagaagaattgcttgaacccaggaggcagagactgcagtgatccaagatcgtgccattgcactccagcttggtgacagagactccatccccccaccaaaaaaataaataaataaatagggaaagaaaactatctttttcttttttctgtaaaaccgatttttaaatttcctctactgggacatgttgcccctttcaaagacaatccctcctctcctccaagattcatcttaaaagccacttcacactctccctgaactgctcaaattgaaattttaccccatctcccaagacttacgtagaatgagaaccagttgcgaagctttcccggtccacggccgccagatctagccccctaccttggcgttccaacaccctgatggtgcccccccgagaagcctttccagggttgtccgggaaggacagtccggccctttctctgaattagttgctccctcgtgtagagttctgtcttgctagctctgaacccttcatcaggccttcctgcaaagagtaggtgtgcaacagacagttatcgaatccagttacatggtgtttgtctgaagccattttccatgttgctgtggtctaaatgttgatgtccccacaaagtcccaggctggaacagaatccccaaggcaatggtattaacaagaggggcctttttccagcgatgaggtcatggagctgagtgctaatgagcgggatgagtacccttgtaaaagaggtgcgagggagccgtttgtcccttctgccacctgagcaacatcgtgccaccttggaagcagaggccaggtcctcaccagacactcaacctgctggcgcctggatcttggacttcccagactccagaacggtgagaaatccatttctgtttaaatgacccggtgtcagatatttttgttacagcagcagggatgaactaagacacacacattttagacaactgcctacataactaataagaatgggccagggggtggggggttaggggagggatagcgttaggagaaacacctaatgttgatggccggttgatgggggcagcaaaccaccatggcacgtgtataactatgtaacaaacctgcatgttctgcacatgtatcccagaacttaaagtacaaaaataaaataaaataaaataatgggccacgcaggagcccccatcctctggactccccggggctccctatttggacagagtaaaggaaagtccctttctcagttgtggactctgaatagggaagtctgtcaccctcatggtgtgatgggtgaggacttaggaacgtgaatcccagccccagatttgctgctaacttgtgggcaagaccgtgagcaaatcacttacctgtgagatgtcccacctccctatattgagggactatggaggacacttaagccccttcaaccccctacgttttataggaggctcatcatatatacgaaatgctttatgtctgtcttacactgtggatttttcactccgatcatctgtaagcagttggtaactatcccaaggctaccaggatgtagggaggggagagagctcggagctggggagcctcggtgatgctctgaggtgactcccacccaacagagtcctttgcctgtttcccaaagtgcagttaacgagagggcagcaaggaaagcaagtcagagtccacgttggtctgaatatcgctgatgcaggtagagacaaaccccagggaaaaaagacttaaaagtgaaaaatggagctggacaccgtggctcctacccgcagtctcagcactttgggaggctgaggtgggaggatcgtttgagcccaggagtttgagaccagcgtgagcaacatagtgataattcatctctactaaaaaacaaaacaaaacagccagacatgggggtgtctgcttgtagtcccagctacttgggagacggaagtggcaggatggcttgatcctgggaggttgagtctacagtgagatgagattggtccattgcactccagcctgggtgacagcaagaccctgtctggaaaaaaaaaaaaagtgaaaaaaaagtcccagaccctttaaaagcttgaaggatccttctgtgtgtgggactaactgagatgcaataagagaaatggaaaaccacccgagtcactgtcgcaagataattttgtattgaagtaagacacctgaccacagactgacttcacttatatctgcacaactgaaccgagcaaaaggaagttctcaaatcaccattcagtgctcaactcagcctgggaagccaacagcaagctttcaaggcgggcccttgctttctcgtttgtgtgtgtgtgtgtatgtgtgtgtgtgtatgtgtgtgtatgtgtgtgtgtatgtgtgtgtgtgtgtgtgtatgtgtgtctatgtgtgtgtgtgtatgtgtgtgtctacgtgtgtgtgtatgtgtatgtgtgtctgtatgtgtgtgtgtgtgtgtgtgtgtgtgtgtgtgtgtgtgaatcttttctaacagtgacggctgtgagagcgggctctccaactcctgccggtgaccttggacgtgaccttcaccacacggggctcaggctcctcaaccaccaaatgaggaaggagaactaagctgtcccaaaaccattcttttttccatttctaaatcctttgggtgttctaaatagacactaggatctctcaagtgattctgtaacacaggaaacattacctcagcaggcctggtttaaaacccaaccctcccctctctctcattcaccagctgtgaaagtgtaagtaatgcattattcttctttgtcctcggcctccccttctgtaaaatgggtataaaagaacccggctgggcgcggtgactcacacctgtaatcccaacactttgagaggctgaggcaggtggatcacctgaggtcaggagttcgagaccagtctggccaacatggtgaaaccctgtctctactaaaaatacaaaaattagccaggcatgttggtgggcacctgtaatcccagctacttaggaggctgaggcaggagaatcgcttaaacctaggaggcagaggctgcagcgagccgagatcatgccattgcaaaatgccaggctgatgatttccatgtacctttgatagtccagaaaccaggaattttgtgatgttctgtgttcaattggagagtttcagcataaaatctgtaacagtgtcgagacttctcactgtggcctaagaataaaagtaactttcattctctcccagtgtttgggggctggggctgagctacacattgaattttactacaagtttactggaagccaacacaaacagaaacgcagaagggtggtactggctctctgaaaaaaggaaagtgtgtctgttctgcaagaaggaaaaaatagcatctttccttggtactaaatttaaaacaaaatgtattatatgagagatgttaataatattattacaatcttaggaataatatctatagtctgaggaatgttgaattattattcattatcccttatattatttaattttgataatcatcatattatattattaaataacaacagattttaaagtggttggagtccaaagagtatgggttctcctttaatcagcaacacagaatgctgacatacctgaattttgccaaaaattagaatatcaagttgcctaattttcaacttccctcaaaagtttaggctgggcgcagtggctcacatctgtaatcccaacactttgggaggccaaggtgagagaatcattgagtccaggaatttaagaccagcctgggcaacacagatctcatctctacaaaaagtaaaccaaaaaaaattagcttggcatggtggcatgcgcctgtggtcccagctatctgggaggctgagacaggaggatcacctgagccagggaggtcgaggctgcagtgagccgtgatcataccactgcactccagcctgggcaacagagcaagaccctgtttcaaaaaaaaaagagagagagagaaaagcttagataagaaaggtcatacaggccaggcatggtggctcatggctataatcccagcaatttggaaggccaaggtgggccaatcacctgaggtcagaagttcgaagccagcctggccaacatggtgaaaccaggtctctactaaaaatataaaaattagctgggcgtggtggtgttcacctgtagtcccagctactcaggaggctgaggcaggagaatcactgaactcaggaggtggaggttgcagtgagccgagatcacaccactgcactccagcctaggcgacaaagtgagactccgtctcaaaaaaaaaaaaaaaagaaaggtcatacaatcttgacatccatttctccagatgtgccaagctccctctggtcaaccagccagaggatgatcctggacccctcctgcctctgactgccaatggctggagtctcttggggccgcccgggtctggcctgaggcctaaagcctggacctttgcactcagctctgctccagcagtgactcacctgcagagaagcctatggaattctgggaacgatgcgggtggttgtttcaggatggcccacctgagccacaaagtcacctcccaacacacacacacacatacacacacacacgcacacacatcctgtgttaccttgatcatcaggaacaaggccaaccaatctggctgggacatttggtccttgaggaactgccaccactgcctgaacacgatgtcatctgtggtcagtggacgattcttccagggacaaggaaagacgaggaaaatcagaactcaccgcttgggtccctctgcctcaactgcagccttgtttgaaactgggctcttctgcaaacatgctatgcttgcctgagcgtaatgcccaccggagtggcgggatcaggtatgttcatctcccgggcaggctgcgggggtcattccgctcagagcaagtgcccggtctccatcagaacccttggagagcctctgcagccatgaacaaaaaggtaccgagacctgccgtgaccatcctatgatgatagactatgaattcttataaaccgaagaattaccagtgctggagagcccgcgagcagcccggcattgcgtaaagggtctgcaatggctcttcctagcccccactttacacttggcagggtggggcttgtgagagtcacagaggagaggggctgagcgggactggctctcagagccacctccactaatggggcttttccagttcacctctggagcccagtggaccctcactgctcccactgaggcctcctctccagccagccacacaagctcagattcaccaaagataaaactcagggaaactcagctgtccccctggctgagacagcgggtcccccagtaaccattgtcctccttcccaaatgctagcagggcacacactgcctgacttgtccccactcccttgcagcgaggtgtggctgccacgagactgtgtcctggccagtgcaccagtgcaggtgagcacagggggtgtgaatgaagtgtcttttgggaggaggcacatgcttctccaacctattccctttctttgggatgcagatgtgatggttagagccagagcagttaaagatggtggagccaggccaggcacggtggctcacacctgtaatctcagcactttaagaggctgaagcagggggatcacttgaggccaggagttcaagaccagccggggcgacatagtgagactccatctcttctaaaatcatatatatgttatatattatatgtaatatgtgttatatgtatgttatatatgcaatatatgttgtatattgtatgtgatatgcattatatattatatgtaatatatgtaatatatgtgtgatatgttatatattatgtgtaatatatgctatgttatatgtaatatgtgcattatgtataatatatgtaatatatgtatgttttatatataatatatatgtaatatgttatatacgtaatatattacatataatatataacatatatatgattttagaagagatggagtcttgctatgttgcccaggctggtcttgaatatgttatatattatatatgatatatatgttacatattatatatgatatatatgttatatattatatatattatgtgatatgtgttatatatgtgatatgtgttacatatgttatatacgtgatatatatgttatatattatatatgatatatatgttatatatatccagacatggtggctggcacatgtctgtggtcccggctacttgggaggctgaaacaggaggatcgctttagccaagaggttgaggctgcaggagccgtgatcatgcaccactacacttcagcctgggtgacagagaaagaccctgtctcaaaaaagaaaaaagaaaaacctaaaagcaacaaagtaaaaataaaacaaaaacgaaaaaaaactttacaaaatacagaagtgatttttttttttccgaggctgctggaggacaaaggacaaggtcaaggagcagaagaagattcctgtcacacacagaccagcgagaggcacccagcccctagctccccgcagcacgcccgagggcgcctgcggggctcgatcccgtctttccttcctccctcttccgcaagcttttctgtcccggcttcttgccagtctgctggggtctcaccctcacctttcctttctcccgtctttagctctcatttcctttccttttccttctgccctcatttcccttgccctgtccaccatttttccttcatttctctccatccatctctgtgagagtcaaggatccagacattcagactgggtatcctggcgagtttaacaaaggggtggtttatagcagtgaggccagggtcgaaagagaccatggaggtcggtcatggtggctcacgcttgtaatcccagcactttgggaggctgaggcgggaggatcacttgagcccaggagtttgacaccagcctgggcaacatagcaaaaacccatctctgttttttttttttaattaaaaaaaaaaaaaacaaacaggccgggtgtggtggctcatgcctgtaatcccagcactttgggaggctgaggcgggtggatcacttgaagtcaggagttcgagaccagcctggccaacatggtgaaaccctgtctctactaaaaatacaaaaattagctgggcatggtggagtgcacctgtggtcccaactagtcgggaggctgaggcaggagaatcgcctaaaccaggaggcggaggttgcagtaagccaagatcatcccactgcactccagcctgggtgatagagcaagactgtgtctcaaaagaaaaaaaaaaaaagaaagagaccacagagggagagtgcaggacagggccagaagagcaggaaaccactagcacggctgggcctgcagggcaagggagggagcatctaccaggaccaagctgtgtggagagtgctgcatggagcccaggcctctggtcaggggtgcaggagaccacctcgagccaacagggaggggctgaggaataagtagccagcccctctctcctcctttccttccccatctccagctgggagaccccatgagacacgcacagagcaggggagaagctagagagaggagctagccgcagggcagatgggggatatgtggggctgtcccccgcgtgcgttttcccgctgtgccttaccttgtaaaccctatttcttctcctgccgcgtgcatgaaactgttttgtgacagctgctcctaacttctaaataagggcaacttggctttcttcttttccaaaacatcaaaattgggtcgttgctttttaaagtgcggtgccttgggttgttctactgggattagcaggcctctttttatgggatgagacaccatcacccgtcttctccccaagccgcagatggaacgtcaggagtgcagactagtgaaggggaagaaaggatgccagccatctatgagtctgcctgtgtcttattctctaatatcagaccatagctatttatggatccaccaggagccattaacttctgcgtctacctagcggttggaaagtggccagcgtagctgaacagtaaatgaagctgacgggtcagcaggtgttacagatcaggagactcgacgccgtgcccaagcccttccccgctgcatccttcactcatgattctaggaaggccaagtccaggggaggccctgagatgagcctgtgggaaagcacacacttccttactaaaagggacagatgcagatggcacggtctccatcacatcccttctcctgccctgaatgcagacccactcctgggccgcccaggtcatcgcaccgccatggtgggccttcaggaggatgacagcctctgtggcaacggtaggggcagctgaaacacgtgcctctttgtcatagagaaaaacacatctctatctgcccaaaccaccactggtggccattcagttatgggcagccctacgcgttcccgagtgaatcatcatggtgggtaatactcgtatctctgatgcatttagtgaaaacaccattaacaagccattcaacgacgttatcgttgcctcgccacagaagaggcaaggcaggggatatgaaagtgtgcagcttgcggagaaggtgagtggctggtagggaatgctctttaataggcagcgcccctgcagggaggggactcagagtaacgattccatccgcacctgcagaactgagagcaccagaaactcctcacctgcgcgcatcatccaggcaggttaacagcggggaccaaggaccagctttaagggagtgatatcactgagcttgtccccaaagtttagtaaatacacaatgcatgcaaagtctgaaaaactgccgatagcgtttaacgaatgcacagagccccactccgtgaaccactgtcatattttagacaatccaggcgagtcagccctggccagccctgctcttctctgcagtgtttatcagggagtgtatcaatgtcgggaaaacttcctaaggaagttcacccccagaagaacagcttaggtcatgattatcctgctgaggtcagcagcacatggttgtccgactcctgggagaaaagaggatgtgaaaccctcggaagggtgaagggtgcggcaggcgggactcatccggggaggtgtggccaggaggatgttctgacgggaaacggcgtcatcggaaagcccctccccagctgctcctcagttgcagggaggaaaaagaaacagcgattctgcagtggagaagttgggcacaccttcattggtggtggacagtgatgtccctagcgaagggtggtgggacctggagggccctagaggggacgctcagagttgggccagcacccccagcatggggtcccggccaaagagtcaaaacctctgtctactcgtggggaaacacaggacaaaccccaaatgaagggccatccattatcaaaggaggggagtattctttaaaaagaaaggctgtcggggccgggcacggtggctcacgcctgtaatcccagcactttgggaggctgaggtgggcggatcacctgatgtcaggagttcgagaccaacctgaccaacatggtgaaaccctgtctctactaaaaatacaaaaattagctgggcatggtggcacacgactgaatcccagctacttgggaggctgagacaggagaatcgcttgaaccctggaggtggaggttgcagtgagccaagatcacaccactacactccagcctgggcaacagagtgagactctgtctccaaaaaaaaaaaaagaaaagaaaagaaaagaaaggctgtgggatgttgggatgttcccgactgaagaaggctaaagagagagaacagggtcctgcccaaccctgggctggaccccaggctcggaggaaggctatgaatgacttcattgtgtcaacccacaagatttgaattcaaacagcagatctggccaggcacggtggctcaagcctataattccagcactttgggaggccaaggtaggtggatcgacctgaggtcaggagttagagaccagcctggccgacatgacgaaaccccatctctactaaaattacaaaaaaaattagccaggcctggtggctggtgcccataatcccagacactcaggaggctgaggcaggagaactgctggaacccaggaggcggaggttgcagtgagctgaaactgtaccacttcactccagcctaggcgacagagtgggactctgtctaaaaaaaaaacaaaaaccgatcagacggaagtattgtgtccatgttcaatctgctgacattgatgactgtacagtggttacataagggaatatcccttttcttaggaaatatgcccaaaactgttagggccaaaggtctgaggtacgtaagcaacttttcaaatgcttcagagcaagagaggacgcacacacaaacgataaagcgaatggggcaaaatgttaacaagcaaatccagacatagaagtgttctttacactatacatatatttcttccaactttattttaaatgccttgaaaggcaagacctttatctatgtgtgtgaacatgcatggatgtgtgttggggaaggggagggaggaaaacaaagaccatagagaggagagagaggcagggtgggtgcagaggtgggaggaggagagggctgagaagcagtgatcaaacgggaagaacaaggccccgagagctgactttgccagcacctgctgggggcagtttcatccttattaccgcagtgctttcccccttctgccttaaagcttttacgtctgggttttccaagccacctcgatggtgaaggaggctccggagggcagggagggggtcattgcagtttctctttctgatgtagaacaagccgtgggcagagagcccaggagctacatggtgggcacacagataatcaggtaatgccaccaaatgcgagagtccaccagggattctgaaaagtacaaagaaagggtaaattgctgctttttcagaaatacaccctacccgctcactctgcccagggaaatgtaacatcaagatgcagagggatgggccagaggagggacaattccagggagagcccctgtccctattcccagtgcctgtcaactgcccacactttgttcccaactggcccttgctgctgtcaccgtggagctgtggagtcagaaggaagccgggcaaggatgcagactgacattaagttttttgtgactgagctctgaagagcatcttagcatctgaccattccagtgtggagcagggttgacatgataaggagtaagagaaagatggcccggactgcagcaaggccgaggctgaacacagaatcacagaggctccaaggctgaggtcagttcagttggaaggcagatgcccaggggcagccccagaagatgcaagaacacaggcctgccagggccactgagagaaaggtttctggcccaaagacctgcttcctgcccacaccagctgtggcagctgctcttccaagcgctctttctgcacaagcccctcgaacagcaaacagcatcactcggaaccctgtccaagaaatgcggattcatcataattggtcaaccacagccacactctggcaaggggctccaaccgattttcaaagtgtttttccctaaatggttacttggatcagataacagctagctgggaagaaaacccccagtccccatatatgctcccagacatagcttagaaatgtgacctccatctcttatttttattttcttatttgtgtattcgtctgttctcacactgcatgaagaaatatccaagactggacaatttataaataaaagaggtttaattgactcacagttccgcagggctgtggaggcctcaggaagcttgcaatcctggctgaagggaagcaaacatgtccttcttcacatggtggcaggaaggagaagtgctgagcaaaaggggaaaaacaccttataaaaccatcagatcggcagggtgcagtggcttacacccgtaatcccagaactttaggaggccgaggcaggcggatcacgaggtcaggaggtcgagaccatcctggctaacatggtgaaatcccatctctactaaaaatacaaaaaaattagccgggcatggtggcacgtgcctgtaatcccagctactcgggaggctggggcaggagaatcgcttgaacccgggaggtggaggttgcagtgagctgagattgcaccattgcactccagcctgggtaacagaacgagactctgtctcaaaaaaaaagaacaaaaacaaacaaacaaaaaacccatcagatctcatgaaaactcactatcacgagaacagcatgggtgtaacggcccccatggttcaattacctcccactgggtccctcccaggacacgtggggattatgggaactgtaatacaagatgagatttgggtggggacacagccaaaccatatcaatttgtacattgtccttctctcccgttctagtctatacgctccatgaggggagggattttattttattcacggctttgctgccattcttagaacaatgcctgatacctagaaggcacttaataaatatttgtggaagaaaggaagaaatgacttaacttgggaaattaggttaatcatgatgtcattgacagacgaggagaaattattttcagggagatagtggaattccttctggtcgtcaagtcttaaatgacagaagaatttcttaaattctctttacacacagtgtgaaaaaacaactattggttgacggagaagaaagagagctctgggagggacccaacatcagcaggactcttttttttttttttccttctcagatctggctttgcaaaaagtcaccaaagttaaaatgcactagttcttcaatcaagtttccctatattttactacatgtttatcttcttttcttgttccagacaggcaagaacaccttcacagactgcaaagacataagatttctttcaagagacatttatgcaggtgataaacataattaagctggtcatatatttagtttgagattttacttctcagtttgaggtagcaaggggcccccctggactcacacgccttagaccccgtcttcattctcaaggtttctcctggaggaaatgggttccaggaggggagctccagtgagggcgccccagagtccaaggcagttcagatgcgcaggccctgccttggggtcctcctcaatgcattgcagccaatgacgggaaaaaggactctgccctgagcccttctgtgcagggaggaggctctctgggctgctggtcagctggaaacgggaggtcttgcagtagagttttccccctgagcatggggaggagtcctggtatttggggggaaaacaggacttccaaattagagctccctaaatatttccccacaaatgatcctttgggaaatcacctgacacttcagaggagcttgtccctctgatgccacttctctatttaccggagacaaacattcctgctttcaaggctattgacagtggccacgtcggatctgtcccggagttctgcttccaaggctgatggtgtgtgttaaggtcgtggggtggatgcagcagtcaactgtgcattcattcaacaaacacccagcctgatgcgtgccaggcactgggagtgccctggaggtaagaagcacctctcattaatttattcttgttcttccaaggaagcactggaagcacagggggctcgagcccatgctccctgactatgctttttaaacaggacaaaatatgtttaatgcttatcagaaagaataaatgtcttagaatagctaagaacatttagaaattgaggaatagcaagggaggtttcattcaccagctattaatagctcctttagaagctactgaaatgaaaagagtattcttggcacaagaaaagaagtaatttcaaaaatgtatgggaatttaatacatgataaaagtggtatctcaactgaatgaaaaaaggaagatttagttaatgaattgtgttggcattatcaattaccttcctggagcaaaataaacttaaatcccttccatctaaaaataaactttagataagttagaaatctaaaggttaaaaaaattaaaaattagaggaaaattcagggaattattaatattggaataaagacaatctccttaaataagacacaaaactaggccaggcatggtggctcatgtctgtaatccaagcactttgggaggctgaggcagacagatcacctgaggtcaggagttcaacaccagcatggccaacatggcaaaactccatctctactaaaaatacaaaaattaactggacttggtggcaggcacctgtaatcccagctacttgggaggctgaggcaggagaatctcttaaactcgggaggtggaggttgcagggggccgagatcacaccattgtactccagcctgggtgacagagggagacttcatctcaaaatcaaacaacaaagaacacacaaaaactacacaggaaaaatgaacatatttgatcctatgaaattaaaactttggaaaacataacaaatgtaatcaaaagacaaatattatacttagaaaaatatctgtagtacacatgtaagcataggtttcatattacttaacataagcacctaaacatcgatttttaaaaaaggacaaaccaatagaaaaatagtcaaagggcatgaattggcaattcacagaaaaaaaaatttaagtcaacataaaagaatatgcaccatctccaggagtcaggcagatacacatccaaactgcatgagatatcattttcactctgtggacagaaaatattttacaaatattttcccccacactgtggtttatgtctgagtcattaatttttttcttttatgaaatttttgtctgttctctaagaaatatttgcttactccaaaggttataaagatattcttctatgttttctcttagaagtttcatagtttaaggtttggagctaggtctataatccatctcaaaataatttttctgcacataatgtagtagtagttgaggttcaattattttcatttgttggccgggtgcggtggctcacacctggaatcctaacactgtaggaggctgaggcaggcagatgacttgagcccaggagttcaagaccatcctgggcaacatggtgaagctctgtctctacaaaatataaaattagctgggtgtgatgatgtgtgcctgtggtcccagctactcaggaagctgaggtgggaagattgatcacctgaactcatggaggtcaaggctgcagtgagccatgattgcgccactatactccagcctgggtgacagagtgagaccctgtctcaaaataaataaataaacaaacaaattaaatattcccatgtgtttattccatttttccagtactagttgttgaaaagtctttcctttccccattgtattgccttggtgactttgttaaacaactggtcatatattcatataatctgcatgaaagtccttgtctgccagtctttacatcgggtcatcttgggctctgtttttacttgctattttttcttgattatgagttgcatttttgtgtttctgcacatctagttattttgtattatatattggaaagtatggataatatagtgtagccaatctgaattagattgtcctcctttacagagttgtgagagttgtctggcaggtagtttgatgactggaaggctctttggtcccatctggtttgctttattcttggctagggcagggctattttggtcttgaacatagtcctaggaaatagttcctctaagactggacctttctggggtcacacctgaatgcgaggtctcttcatcctggctgggctgaagcacctcttcttccccagtacatcaagacctccagtatcacgtttggccctcagccctggaacaggcaatctctgctgggcctcatggagtcttgccctaccccatacagctcagctcttgaacaaagacctgtgatgagtgttgctgtggacttctagagctacccgtttttctctgggattctcatttgtaaacttcagccactttgacagcccagcactctggcctcttccatcttagctcagcgattgcaccactccgctcggtctcttcctcctcaactgtgacacaaaagtggctgcaagtcagaggcagtcacgggagcttcagctcatgtgattctctgctctcaaaaatcacagtcccgtgctgtctgttgtccaatacctgaaaacatttacctcttatatttgtccagtttatttgtctgtttgagacagtctcgctctgtcacccaggctggcgtacagtggcgcgatctcaatcactgcaacctccgcctcccagattcaagtgattctcatgcctcagcctcccgagtagctgggattacaggcatgcaccaccatgtccagctaatttttgtattttttagtagagacagggtttcaccatggtgaccaggctggtcttgaactcctgagctcaagtgatcccccacctcggcctcccaaattgctgggattacaggcgtgagccacggtgtctgggctatttgtccagtttaatttggcagaaagtcaagctcattgactcactgtcttgaggctggaagtagaagagctcaggcttctatgcagctttcagcacaagctgccttggagttaagctgggttaggacaacctgttgccactggattgactccatcaacagctagccttgggatacgcgcctttcagtcacactatggccaccacccagcctgtcatcctgcattagggggacattcagacaaggcaggaccccacacattagggatgtccctagctcacttggactccacctgcacatattattccacgctctttcaaaaccaccgtctctccatcctcgatcaagaaaggatttgcaggtgaattagactgttgtattcatacagatttcaggataattaaccttaaggataattttatttgtgcagtgaatgatcatgtgaaggggaccataaacacttgatttaaaaaacacacatataccggcaaccgaaatagactaaaacatctaggctgatttgaaattggccctgaagacactgcttttataagtcttgtttcctctagcttcacgtgtgtgccctgaggctgggggcacatgccgtccctccctgtatacccagcatcccgcacactaccctgaaacctcatgggtgcatgagtatttgttgaattggaccaaatggattcacttgtctcttctgttatatttgagtcctcttcaaggctagctacaaatttacgtgaactttactgcgtttcattctctagtaaaggcacaagtcttgggaagacacacacacatacacacacacatactacacacacaaacccacatacatacacatacacacacagatacacacctacacacgtacacacagatacacatacacacacatacacacacacggttgttcttcaccccattctgagagcacttcctcactcaatcttggagtcatgtgttcattggcaaagttgacagagataacttcttagacatttgcaatattttgacaggacaattatgcaatgtcctcatcttcatgaacctgaaccaactttcaagcatccaagacttacttagtcagcattcccaccaaagtagccaatagcaggagcctaaaacaatgaactctttatgaccaaaatgctgtgtcagatgcaacttcagtaactaaattaactaatgagggtctcctggggggaaatgggataaccctgcattcttgttttacccctccctgtctttcaacagctctttagaggtttatctgtgtttaagactctttatcagattgtcatttgaaccgcagggaaagtgacttctttctgcatttccacaatcaatccatttattcagagaaagttcttcaccagcagatatgattgtatcaatggggtttcccctaaactcccacttaaattagatttttttttttttaagatggagtctcactctgtcacccaggctggagtgcagtggcccgatctcagctcactccaacctccgcctcccaggttcaagcaattctcctgcctcagcctcccaagtagctgggattacaggcgcatgccagcacacccagctaatttttgtatttttagtagagacagggtttcaccatgttggccaggctcgtctcaaactcctgacctcaggtgatccacctgcctcagcctcccaaagtgctgggattacaggcgtgagccaccacgcccaggaaatccgtgtaggaagagataagatcaatttcatattgccatgttggatgctgttccaaaacccccccctttccaaatacatgtgaagagtgtgactttgtcacacaacctgcagtccgtagactggcgtgaggggcctgttgatcactaaccttgtgggcaaaatgttgtgtgcacgtgcatccatgtgatctgatgaaatccacacagcatgggatgctccagccacaccagcctctgccaggtgaatgttcctgtaaatttacatcaggggcctgatgtgtcaatatcaaccccatggaagtctctgtgttgtgaaccgttcaagggtctcagaaggtagtgtcgcctctaagctgcatcctctgggcaggcttgaccttggcagaaatctcaaccacctcagaaaagcctgccttctccttggctaagtaccttccatgcaggagaggcaaatggtgggcggggttgaggggtggtcagcaacagcccttgaacactcatgtcatcggtgctggagctcccccatcatgagccacctctaagggtcatgtgctgtatttccctggaagtttccaacccagcccttcccggcccttccctaccactccccactctgccatccactcatggccccatgttattcccccactccccatgcttcccttttaggtgcacctgctctccttaaacacctaacaccaggagggctctaaaagcaggcaggctggctgggtgcagtggctcacacctgtaatcgtagcactttgggagggtgaggtgggaggatcacttgaggccaggagttcgagaccagcctggccaacatagtgaaatgccgtctttactaaaaatacaaaaacattagccaggcttggtggcagacacctgtagacccagctactcaggaggttgaggcatgagaatcgcttgagcctggaaggcagaggttacagtgagccaagatcatgccaattgactccagcctgggcagcagagtgagattctgtctcagaaaaaaataaaataataaaattaaaaaataggctgggcgcagtggctcatgcctgtaatctcagcactttgggaggctgagacgggcggatcacgaggtcaggagatcgagaccatcctggctaacacagtgaaaccccgtctctactaaaaatacaaatacaaatacgaattacaaaaaaattagccgggcgtggtggcaggcacctgttgtcccagctacttgggaggctgaggcaggagaatggcgtgaacccaggaggtggagcttgcagtgagccgagattgcgccactgcactccagcctgggtgacagagtgagactccatctcaaaaaaaaaaaaaaaaaaaaaatagaagcaggagggctgactgcgcagcctgacctggtttcggcctgaccctcgtgtccccctgtccccatcatctgtcccgtgttccattctcccaaatgtgaaaaactgcagccaccaagtccctatgtcctccaagtgtgacgtcttgtggactgagacgttgcccccagactcctagcccagcataccctgttccagcgagtgccacgcacaggccattccccagcacctggtgctattgccacttcctgtcaccactaaccagacagattttacacacatatttgagcctcttgcattctggtgcagattttccttctgactggcatttgccaataggatgattattttaatattttaaaattagagatggcgggggggggtctcactatgttgcccaggctggtcttgaattcctggcctgaagcaatcctcctgcctctgcctcctaaagtgctgggaataacaggcattagccaccgtgcctggccaagatgattttatagtccgtaattcagaaaagactattctgtcctagattattattattttttgagacggagtttcactcttgttgcccaggatggagtgcaatggtgtgatctcggctcactgcaacctctgcctccagggttcaagcgattctccttgcctcggcctcccgagtagctgggattacaggtgcctgccaccatgcccagctaattttttgtatttttagtagagaaggggtttcaccatgttggccaggctggtctcgaactcctaatttcaggtgatccaccccccttggcctcccaaagtgctgggattacaagcgtgagtcaccatgctcagccgattcttaaatttagattattagttagaaaaaagtgcgctgaaaacaggagtcaagtcttggggggatgggggagtttgtgggtgggtgtgtgtgcatgtaccggggcagaggggagcttgtagaagaagaaggagagagaccacgttctccataatgggcctgactctgacgcatgttagctggagtccttgctttctaaatgtatctggatctcccccttcctggtccgaatgttttctgtgttgcattttttgagccctcactgtgataacacgaatgctgtgatctgatctcaagtggagaaaaggggtcctcctttccatcaccaacgtgtgagctcaggtaggggaagccaaagctctgccccaggcaccctgagaatcaggaaggcaccaggtggatgtgtgcaggagggactcggaaggccacaaggggagacagacttgaagtttcctaacttgagggccaacactcaccagttccttcaccaaggacgtctccaaccagaaggaccaaaaccatggaggtgacagacaggtgaatatcaaaatttaaaattgagcccagggtcagtcctggccctggcatccggtatcttcccacattggccacttttctccagctcccagggggctgctttcacaggaagcagagttccagtgaggacacctttgcacaggtctgaccctgagagcctcttactgtccagccacttgagtgaggccttattcaaacggtaaagggtgaagctgctgccctccagggtgtgatgggcaaggtctgtgtagagatagtgagggccaaagccggcaacatagtcacccaggggtgagggccgaggctagccctgcccaaaggctggagcccaggagaccagccagggagagaacatggtcctgcaggagggtgggaggtcaccccacttgttcagcacagctcatggagggcaggcgaggaggctcggcccccgccacactgcccctccggagcactttacttctccgtattcaagactctgcgtcatgccattggaataacacaaaaaacatgcttttgtatttgctcaccaacagtagtctgttcattcgagtaacgtccttctggcaggcacctgttgttgattttggaaagtttaggaaaacatgagattcaggagcctcatatgcagtcaccggatccgggtgccctggaatggccccagcccccaagtgcagctgctcacgggccacaggctgccacgttcctcctgacggggatcgtggagatggcgcagcaggagaggaagactaacaggctgccacgttcctcctgacggggatcatggagacggcgcagcaggagaggaagactcaagaggattcaagcctgacagtacttttggcttctgggtctaggagactcaacattcttcccagtcaacattagatgaatgaatgagtgatgaagggggtggccaggagtggtcaggagcaactctacacaaaatagaaggccaggcgcagtggctcacgcctctaatcctagcactttgggaagctgaggcgggtggatcacctgaggtcgggagttcaagaccagcctggccaacatggagaaaccccgtctctactaaaaatacaaaattagccaggcatggtggcgcatgcctgtaatcccagctactcgggaggctgaggcaggagaatcgcttgaacctgagaggcggaggttgcagtgagccaagttcacaccactgcactccagcctgggcaacaaaagtgaaactctgtctggaaaaaaagaaaaaaagaaagaaagaaaaaaaacaaacctgaaacaaagcacttcagatccccccccaccccaccctatccctcgccccaaaatcaaccatgcaatagaagaaagctgtaattcagcccttcagactaattagatatcttaacacaggcacttggagatatataaaaagaaacaactagaatcagaaattcaaatcctaagaacaggaatggcaaaagtgaaatgtgggagaaggctttaaaatgggtgatcggggaaaggtatatgaggcgtctctgtaccattcttgcaacctttatgccagtttgaaaataccatgaaataacagattttagaaatgctgaggattttcttgtgaacggcatggggggctgagaggaacatcgccctggctgccggcgagacagcatcccagcccaggagctgttgacagagggcagcttgggtgggaccacgacagatacctgcaggaggcctgaccggcggcggggatggggactgagccttggcggttgtattagtcggttttcacactgctagtaaagacatacccaagactgggtaatttataaagaaaaagatgtttaatggactcacagttccgcatggctagggccgggaggagggaggctcacaatcatggcagaaggcaaaaggcacatcttacctggcagcaggcaagaaagaatgagaatcaagctaacagggtttccccttataaaaccatcagatctcgtgagacttattcactaccacgagaacagtatgggggaaactgcccccacgattcaattatctcccactgggtcctcccacaacatgagggaattatgggagctataattcaagatgagatttgggtggggacacagctaaaccatatcagtggtgatgttactgagggcggccagacaggccaatgaccagagcacaggacacagctacagggtttggccattctgaggaggagcagcacaaacaagagaaacagcccagaccctgtccactgcacactttggccagtgagcgcgcctcgatttccagactatgaaaacatctgtcggctgggcacggtggctcacgcctgtaattccagcactttgggaagccgaggcaggcggatcacaaggtgaggagatcgagaccatcctggctaacacaatgaaaccctgtctctactaaaaatacaaaccaaaaaaaaaatttagccaggtgtggtggtgtgcacttgtagtcccaactactcgggaggctgaggcaggagaattgcttgaacccaggaggtgaaggttgcagtgagccgagatcgtgccactgcactccagcctgggcaacagagcgagacttcatctaaaaaaaaaaaaaaaagaaagaaaaagaaaacatctgtctctgagaagcatcatagtttacttaatctaaagaaatagcatatgagcacccagtacgtagcagtgagccagtgaatcataagcacgatttcttttttatttttttgagaccaagtctcgctctgtcacccaggctggagtgcagtggtgtgatctcggctcactgcaacctccacctcccggattcacaccattctcctgcctcagcctcctgagtagctgggactacaggtgcccaccaccacgcccggctaattttttgtattttttagtagagacggggtttcactgtgttagccaggacggtctccatctcctgaccttgtgatccgcccacctcggcctcccaaagtgctgggattacaggcgtgagccaccgcgcccggcccataagcacgatttcttatatgaaataccagagaaatgaggggtgccaagcacagagtggtggccacatggccattcgcccgatggatacttaaggatcacagtggtgatgaaaatgagagcgtgaagggtgagttcaggatctgtgtgtaacagaagaaacaccacactgccttcagtgtggtgagattgtgaacaaaggtggtgcagggatgccaggacccgccagccgtgtaaggagaggtgctgcagctgcctaaaccccagtcgggaggggagtttagtgagccgtctggtggagagaagtgggtccagagttagaagacagcagtgacgctgcccaaagcaggctccttctttctctctttcctcttccagcttcagatcacctccaccctttaagagttagaaccgctttaagagttagaacaaccatcctgacagcctgtgaacacacctgaaccacattctcttcggtgcaggaaacaggttctgataaatgattcacatgattctgcctggcatgaagcagcctgcggtttattcccatgcatcgtttattcagcagacacaccccgagggcccacaacatgccgagcattgtttaggagctgggaacacagagacgaactgaagagacaaaatcccgtttcccacagagctgaccatctagttagtgtcacggttgaagggaccatatcaccctgtccttcatgaatgcagatgcaaaatatccttaacaaaatattaacaaatcgaatccaaaaatacacttaaaaaatcatgaccaagtgggctctatctcaggaatgcaaagttgatttaccacgaaaaaaaaaagccacttgattcgccatgctaatgcactaaacagaaaaatcatgaatatttgcatctgtgcagaaaagccatgtgacaacactcagtcctgattaaaactctcagaaaactaggacaatagcaggtggagcatctccaacctgataaagtacatccctgaaaaacctacagctggggccgggcgcggtggctcacgcctgtaatcccagcactttgggaggccaaggtgggcagatcacgaggtcaggagatcgagaccatcccgactaacatggtgaaaccctgtctgtactaaaaatacaaaaattagccgggcgtggtggctggcacctgtagtaccagctacgcgggaggctgaggcaggggaatggcatgaaccctggaggcggagtttgcagtgacccgagatcacgccactgcactccagcctgggcgacagagcgagactctgtctctaaaaaaacaaaaaaacctacaggtggcatcaaacttaaagatgaagaactgaatgctttcccctaagatcaagagcaagacaaagaactcatcctcaccatctctattcagtattgcactagaagtcctagtcagtagaataaggaaagaaaaataaataaaggcatacataagaaagtaaaaggaaaggaagaaataaaactggctttacttgcagacaatatgatcgtctatgtagaaaatcgcaagaaatatgcaaaaaagcgattagaactaataaatgaatttaacaaggttgcaagatataaaatcaattaaaaatcaatcaaaaaatcaatcatatatgtatatactagtaacaaacaaatagctattaaacttttaaagtaatggtatttataggctgggcgcagtggcttatgcctgtaatcccagcactttgggaggccgaggcaggcggatcacttgaggtcaggagtttgagacaagcctggccaacatggtgaaaccccgtctctactaaaaatacaaaaattagccaggcatggtggcaggtatctgtaatcccatctgaggcaggagaatcgcttgaacccgggaggtggaggttgcaatgagccgagattgcaccactgcactctagcctgggtggcagagcaagattctgtctcgaaaaaaaaaaaaaaaaaaaaaaaagtaaaagtatttataatttataatagcatcgaaatggatgagaaacttagggacaaatttaacaaaatatgtgcaagacctataaggtaaaaactgtaaaacattactgagggaaattaaagaagacctaaataaacgaagaaataagccctgtttatgtatgcatcagaagctgcaatattgttagatgtcagttctcccatgattgatctagagatttaatgtattcccaatcaaaattccatcaagcattttatggaaattgataagttgactttaaatttatatgaaaatgaaaaagacttaaaatgggcaaaatgattttgaaaaattggaggactttttactatctctgactgccaaacttgctataaagctacaacaatcaaggcaatatggtattggcataagtatagacagagatggatgaaacagagcagagggtccatacagccagtatggagaaaggcatggaggttcctcaaaaaactaaaaatacagctaccatatgatccagcaatcccactgctgagtctgtaccccaaagaaaggaaatcagtagatcaaagagatacctgcccttacatgttggttgcagctctgtccacaatagccaaaatttggaagcaatctaagtgtccatcaacagatgaatggataaagaaaatttgcagattttctgggtctttcttctagatatggtgagaactttgctccttctagctttctgtatcctaagtggaagccagaacacatattctatttattttttaaaattagaaggaggctgggtgcggtggcccacgcctgtaatcccagcactttgggaggccaaggcaggcggatcacctgaagtcaggagttcgagaccagcctggtcaacatggcgaaaccccgtctctactaaaaatacaaaaattagccaggcgtggtggcagatgcctgtaatcccagctactcgggaggctgaggcaggagaatcgcttgaacccgggaggcagaggttgcagtgcactggtatttcaggaaggtgccccctcaagtctccatggtatcccttgggccctgaacagggggctaatttgtctgcaccttgagtgaggccaatgggctcgggctgtgatgtgtgatgtctgctgtcaccgacggtgcccagcacaatgtgagaacttagtggtctccaccccttttcctgtgaccgaaagggtgcaccagatgctatggagcagacacacacaagttacccttgaacaaggcagcgtgcagagttcagaaaccagtagcacaagcatggggcgggggcgctgctctaagacatcatcagcatgaatgggcgaatacctgacaggtgtgagtggattcggttcggtgtgagttaatagcattgcgtcacacaagcacctgaacaaagctgatgacatcggggggctctcgggtgaaggaagctggggtcccggttttaggggaattcctcctccaggagccctcctggcgtctctctttgccacccagccccagcttaggatggagggccctaggctgggttcctaaggccccgggtgattccctgaggcggccatcatccacatacatgcacgcttgtctgcctgtggacggtgtaaagcccctcgaaccctcccacgggccgtccttatctctgtacccacggggctggtgtgcactagagcagtgttccaccaataaatgagaaggcgctttgaagaatgagcaggcgctcacctggctgggagaggggtgggcgagacccatggctgggaatgagcagggctaaggcagcagcattccaggtcccctcagtcccatggctggagcagggctgtcgggggaggctgcaggagatggaatggggaggccaaaagggactccagcctgggaggtgcagtctccccctctaaggagtttggggctaccccattgtcaggaaggtgttttgaggggtttccaggaggtggctggtgggacacaatcacattatctgagccctgaaaagaccaggcaacaccatgggaaactggctggagggaaaccagtgtggagcctactgtggtcccggggcgggagaccagatcctctctgggtgttcgtggctgtccgtggtgtccaaggcaccagggacaaggctacgcaaggggcacctctagctcatggcggatagttccgacgctgcagccgtcagacgtgttaaatcacacagggcatgaaccgggaaacatgaaatccaccctcagcttcaattgctccaataattatttgttagctcagaagttcaagacatttggaacaggtccaacaatgatgtcaacttagttcccatctctgaatctgtggtggagaaacctggacactggaaacagggtgggtttggggatccggctgacctggggcccaattctgacttccctgtttctgcgagcccctggatacgtacgtttctaaatgtctctgaacctcggttttcctgtctttatcattcgtgcattcattcatgacattgtcatttattcaacaaatacgtactgagcacctactatctatcaggcaccgttccaagtacagggaatataggtgtgaaaaaaagctcctgccctcactgattttacatcctgggacagggagacagaggaataagtcatgaggtgccactgggcagggaaggggctggggagagctgcgggcggctgtgatcgtggtagcaatgagccctagcagcactgctttcatctcggggctgctatgaggactgagttagagaatgggtgttagaagagggctggcacctgccggggcccagcatctcatcctgcaccagcctggtgggaaggcttgattcccttcaagtatcaacagccatggaagctaaatctcgaccagacctcgcaaggagatttaaaaggagaaaagaaaaaaggcatcattctgaataattattcctcaaagccgtccctgtggcgtgctgataacctatcgggtcacatgtggcagtttactttaaaggcaaaggggtttccaaatgaacctgcccgggcggggaagctcttgtggttcctggcggcatcctgtccctcagtagagaatcttatcacgacttcctcaggctgttgacattctgattagtgtgcagtccacagacatcaaaaaggacaaggatggattctgaaaccaggaagttttactgactgtcttgctcacagacattttagcctgtatgttgtcatctgcagtcagtgactgtaacctctgtattgtaccgtccagtgaaaaggacagctccaatgtgaggagtccccctctacactctcctctaaaaggcttccagcttggagcaggccccaggacacgcccacctttgttggcatgtctgccggggttcatcctcacttccggtttccagtaaaccagatcacagtatttctgcctcagctactctctgcctatggggtaaccctgctctgccagagcagtcaaaaaagaaaaaacattgggaaaaaaaaaaggaagaatattatttctgcctcaacagtcttgatttcggtcagcaggaggctgcggtgggatagctgggagcacatttggggtggtgtcaagtgtcaccatggaggggaggttgagcttgatcctctagatgtgacactggccgctggtctgggagtgagggtggagagacaggctggtgccttgattagcgccagcagctcgctgctgcactcaggccggagctgccagagacagccctcaaggactcattgttggttgagcaacgcagagagtatgtgtggccccagggcagccgggccccagggccaggttacttaggggtgtatgtctgctgcctgaaccctgaaggccaggtggttagcccaggccatgttgcccagctgtattcattccttttcactctgctggtaaaaacatacctgaggctgggcatttacaaaagaaagaggtttaattggactcacagttccacgtggctggagaggcctcaccttcatggcagaaggcaaggaggagcaagtcacaccttacgtggatggcggcaggcaaagagagagcttgcgcagggaaactcccattttttaaaaccatcagatctggtgagacccattcattatcatgagaatagcacggggaagacccgtccccacacttcagtcatttcccaccgggtcccttccacaacacgtgggaattatgggagctacaagatgcgtttgggtgtggacacagagcacagccaagagcaggtgtccctgagaacccaaacatcctggggaggccccgagcactggggctccctgccccacccagggcaggacgtgagcaggaccttttgacatggaggcagagaaacacttcccaagaacctcagagggtgggcttgggaggggtggccaaagctcctccccccaggccaccgcttcatgcgtggagtttgtatcctgcagctttgccaaatccacttattacctccccgtttttttgtgtgtgtgtagaatctttagggttttacatatatatatgtgtgtgtggggggtgtgtgtgtgggggtgtgtgtgtgtatatatgtgtgtgtgtgtgtgtgtgtgtgtgtgtgtgtgtatatgtaaaatcatggcatggcaaacagagatcattttactttttcctttccaacttggagaccttctttttcttgcctaattgccctggctagaacatccaggaccatgttgaggagaagtggcaaaagcaggcatccttgtcttgatcctgatcttagaggaaaagcttccaatctctctccgttgagtatgaggttggctgtggtgttttcatagatggccttgtactgtgacaggtcctccaccaggttacttaagggcatatgtctgctgcctgaaccctgaaggccacatggtgagtccacgccacggtgcccagccaaggagtaggtgtccctgagaacccacacagcccagagaggatctgagaacccgccaaggaaaagtcccatggcacacacacacagtaggcaaagagccagaaaatcagcgtaaaagcagcctagagatgggggcggcgtggatctctcgagctgtcctgctgctgtccggcagtgccctgtgtgcgggtccccatcaactctgctactcaccaggctggacttgccccagtccttctttggggcctgggaaggaggggacgatactgtctcaagtgtgtcccgcagtaggccttgcttgtgttgaaagggttccttctgcgcctgccccgttgggtgtatttcctggtggagtttcatttcgtccaatgcttttcctgcatcgatggagatgatcaccccgttttctccttcattctgttaacggtgtagatcacactggtagatgtttgtgggtttgtggcaggccaggctcactaacgcaggcctccataacaactgtttcagcactgaccacgtggtgaagttaaatattaaaagccggccgggcacggtggctcacgcctgtaatcctagcacttagaaggccgaggcgggcggttcacgaggtcaagagatcgagaccaccctggccaacatgctgaaaccccgtctgtactaaaaatacaaaaattagctgggcatggtgccacgtacctgtattcccagctacttgggaggctgaggcaggagaatcacttgaacccgggaggtggaggttgcagtgagccaagatcatgccactgcgctccagcctggcgacagagtgagactccatctcaaaaaaaattaaaacaaaaataaaagctgagagagctggcccccttatacaaaggctgggatgtaacaaaagcctgccaagagttttgcccaggcctttcctgggccttaaagcatgaaaaataacaaaggaattcttaacatgacccgtttaggactaaacaagttttactgaggccatgaaccacaagcccttccccaggtggaccattgggaagccacatgtgaccagtaggtggtcactcatctttctgcagagctcccaatgtgaccagccagctccccacctgccggccattataagagtcatcctcttcttgacacctccagaagagaacctggatttccagcccaagtctgtccttgtcggctgcccaggcccaacacttaggactcatcctgatttctccttctccctccatttctacctccaagttctgctgcccctccctcgaaggcacatcatgaatttttaattgtcccctacacctctctcacggttgtcccagtacaatccccatcacccccaactgagtcatgtcacagcctcgtgctggcactgtcctcccccaacaattctccctccagcagccagagtccctctccagcccccaagctccacgccacctcagacgtcccctaccatggccctggtcccgctccatctggcccctgctgacctctcctctgcatcccctgccaccccaggccttagccagcccatcccagcaattccttcaggatccctccaccccaccactagctaccctactctaagcggcgccccgggcccttgcctggtggcctcctcttcagctcagcaacctcttctcagtggggccttccctcatcagcccgttcaagttacctcctccgcttgctctttccaatagccgcccacctgtttgctcctggggttagccccccacaccccgggatcacttcactcaattttctcatgtctgctctacccagactctgagcgccagacacgggttctcactgctcccagtctccacctttggcggccacagcctttctgccgacctagcatccattctccaccctctgcttgccggcgtccggcccacggtaccccaactgtgtctgcaggatgtgtgcccagccccagtgaggcatcaaatgggcctaagcggaggattggctgagaggtggagacgagacccagggtgatgctgaaacgtaaggacacgtctgcagggaatccggggaaagacacttcctccttgatgaagggaggcaagcatggggggccctggctgcccctcgctccctgctcctccttctgagtgccactgtgtgaggatatggtatcccctccttctaactgtgccacgaccgggtcaatatgagtgttccaggagagcggaggaggaggaaagctccgggttacatcccagggcagccgaacaacctggagcgcacatttgggacttcctgttcttatttgtgtcctcatgagtcatgtccccactaggtgagctctctgtgacgtgcagcctcacgcgcactgacaggcatgaagcccagcgctgggcgcatgggacctgctccatcaggttagaagcagggaacaaacgcctcacggctcctgctcccaacacaaccatggagacaggcacgtccgcataagccatcccagaaccgagtggactcactgctcaggagcacgaggaggcccttcagcctggggaaaaagctgggccaatctggacggcgcaaggcttcgaagaatgagaaggttttgcacaaacaggctggcagaggagatggcaaaaggaagtctcatgagcaaagctattagctattaaacggtggctgtggagcaagagcttgggacacagggcagggagggcgcagttaaggatagaaacagctagagataaggcgaacagagcctggtggagaaggccttgagcatcatgcagattcacgttctcttctgcaagcaaagggacaggttctgtttgcttgttttactaaatggaggaatgacatgatcagtagatgaaaattccacagccgcatcaatcacggagtagaagatggcaaagcctagaggtccgcagaccagtggggaagccacccccgcgggccaggcctgtgatgaaggtcttggggcggcgacagtggctggaggagccactccagaggtccacagggagggcttgggaatgcctgggtgtagggagagagggggagacacatgagaaagggctccaagcctacacaggctctctgagggtggcagcagagtccccaggacaaggggcagtcttggggctatcagctgtggacaggctgagctggggaggcccggcagccactctggtggagacgtcccacaagcagtcagaggtggaaaggggagcctggaacgggccggaattgcacaggcacacataggggcccacagcgggtagcagcagggtcagtcgcgggactgattatctgtcaaggaagagggcttaggaacactgggggctagaatcctgggggatgtccagcagctggcgggtgggcagagaggagaggccagggaaagaacgcacagggagctgtcagagaggtaggagagcccaggtagactaatccaccagagccaagaggagagaggagggggacccctggctgaggagtgaacgaaagtgaggacatagatgcaacgaggaactgtcggagtccctgttagcaatgcaaaatgtttgttccctggtgtcacaaggaaaaattagcattcagacaaaaagttctctcagcgaggcaatttttactttctgcagaaagggtgtcccttgcagatggaacaatggggagggcacacacagaataaagagacgccagaatatccattctatatgcatgaggcctctattgctgtgtcctgtctccattggctggagccggacctcacaatctaaattaaaacccgattggctaataatttattctcaaataaggaaggagcataggctgtgagctggaacatgcctatgagcacgtgagcacagatatcttggttaaggtacaaggacatggaatgtactacgtgccttgagcatgtctaacagctacctaggatagggcttaacaaagagttattagcacaaagcaaggaggcttgaaggaagttagtctttaaaagaaactattatttctaacacttatgatttattctttaataagaagggaaactttgaagaggaaactttttactttctacagtcctgcaaccacacaaacaactgcagagaaaggcagcagcagcaggcctcctaacagccaagaggcggaagcaacccaaacgcccatagatgaatgaataacaacgtggtctccatacgatgaatgttatctgggcataaaggggaatgaggctctgacacacgctacagggatgagtcgtgtaaacgtaacgctaagtgaaagaagccaaacgcgaaggcccatgtagtgtatgattccatttgtatgaaatgcccagaagaggcaagtgcatagacagaaccattaggactgcccgggaccaggggaagaggaggagaggctgctgatgagtagacagggtgtgctttggggtgatgaactgttctcaaatggattttattggcgttttaataacttcgtggatgtattactattgcaggatttttccttagttcagctaaacacctcttaaaggtcctaccttttcatactgtaacaatggcagttacatttcaacatgagttttggagggaacagatattcacactgtagctttctgccactggttcccccacactcgccagtctcagtacaaaacgcattcattccatcccgactgccccaaaagtcctaacttgctccagcaccaattcaaaagtccaaagtccagagtctcctctagatcagatatgagtgagactcaaggaacaattcatcctgaggcaaatcccctccagctgagagcctcgaaatttaacaagttatgcacttccaaaatacactgggggacaggcatgagatagacattcccattccaaaagggaaaaaagggcaagaaggaaagaataaccaatcccaagtaagtctgaaacccaatagggcagacattaaatcttaagactccagaatgatctctgactcatcttaatgtgatcccccaaggccaggagcagccccaccctgtgctgggttctgcccatgccgcagctgtcacaggatggcatctagtgcctacatacagctctcccggctggggcggcaagctggtggtcccacagttctggagccttgggagtggccccgttcccatggctcagctaggcattatgaagtcatgttaccagccaataaatgtaatctctcttctttcctatctggatgcctttcatttcttgcctaattgccctgactagaacctccagtacaatgctgaatagaagtggtaagagtggacatctctgtcttgttcctgagcttagggagttttcaaatgagatgggcgtttctgtggtttgagggaaagaaattaatggggaaagaaactggggatatgtataagacaaaggataattgacagagatggatccaggggagacaggaaaaaagcaggccacttcttctggcgatgggagggaacaaaaacaactctgactgatgtggaaaggtaggaatgctgcccttcacacctaatggtcgtctcttctcagtaaagtggggcagtcacctggggaatggtcagggtagactgggggcttgaagcaaggaggaaacatcaggcatgactgctgctgtgtggaagaacgcggaccagcccgtggagatggacccacagaaggggccagcctggtgctttgctgtctctctgttcggtgctggttcaccaagcgccttcccctgcttctgggttctagcccacctgagacttttccctgtttattccctggcattatgaagtcatctctggaaactgaaatcatactaaaaatgtattatattgactgaaggcatatttcttgatcttaatttaaaactgatgtttcacgtttcttctaaaaaagtgggggcggtgcaaagactaagttacttatcttttctgactctgctcttcttaacagaagacagaaccctcctcccactttcaaggtgttacaactgaactcaaggtgcagctggagtaacaccctcctgcacaagtgtccggtcagcacccctttcccacctcgagggccccgcctgagcccagagacaccgcgaacaacaaagatggcttgggcagagttggagtttatttgctgcagttccttggcgctagtttacaaggcaaaaacaaacaaacaaaaacaattagaataattatttcttaaaaaccctgtcaacaactttcagtcatttctttatatttttgtattttgacaaaacttcttttaaacaaatacaaaataatctaaaaggagaaaaactatacatagattatttacacctctgataaatagactaatactgacccaggtgcctctctgtctaggaaacacttgagaaccaggccagggcccgggccagctggacaggctccagcaccggcccaaacacgcccagacctcggcaggcaccacctggttctcccacccagaaagttcaggtttccagcctggaccctcttctgtcaccctcacaagctctggcacaaaagtgcctaaagccattccctccaggtaggatctacacaaagtggcggggagggaggtgacagactgtccccctctattcctcccaccactcctctgcaaaagctatttccagagatgctcgccaaccctaaaggatcagaggagccgtggcgacgcggccctgtgaaaacccgcagctcctccacctgcctcctcagggctgcgccctgcaccgccctggtccagggtcctgtggaggggcggggcgagacggccagacagccagccacctgctctgcctggactggcatgctggccctggcggagtggcaggagctgccctgagagtccctgagagaacggcaggaaaatgctgcgtgtcacggctcccttcatactgtaatgaggaggggcagggccagctcacacagcgcctgcaggggaagacagagatgcgagaggcagcccggccacccccctcactccagtgcaccccacggagcagataaaggcccatcttcccctctagggggcccaccacaaaatgcatccagagtagtccagttagggctggttttgaggcagaaaaagctgaagccctacggggatcggggaagtcctactccttcctctagaacgaggactggagtctggggaagaggaagaaaacccaaaatgaaacaggttatccggaacctctgtcccgataaccttcctcacagttttggttattaggtatttagctcaaggaaaatgctgactttctactttaaagcccaacaagaacttggattctgaaggaggaaaataacgtaagcgtccagtcagctctctcctctcctcggcgctccgcaggcacttgggatggaaaagcatccgcgggagatgccggactgcacgctgctgccgactgcgaccccggccagggcaggcccccgactctgactgtgccgtctgaggctccactgggcctctgccctctgcgtcctcgacctcacctgtccatctcgcccagacaagcaccaggcagcgagctcccacagcacaggagaggcaggccaggccctgccgcgggcccaggctgatgccccttggccgcagccccaggtgctcttctccagggagaagctccccagcgcagccagggcagaatgcacctgaacagccctacgttctctcttaaaaaaaaaaaaatagatctttatagtatgtggcttctcttcctttccacctttttctcttaacatataataatatatggacacatgtatttatggtgcagggtttgaaggcttcttcacggggacaaccaagaggtaaacagttggctctgagctctgctaccagaacactgagcagagaaactggccaggaggctgccctgccgacaagagctctgccctgtgagagaggaaggctctggagcccatgctggacaggtggccggtcctctcttccccagtgataactgcccacccttctcccacttaaaaaaaatagcaaaagctgaagctagtctctaggaatccagggcggggcctggcagaggacgctctgctcggcagcagtgcatccatggaggtgcgggagaagagcaggagctccaaggcccccgcagaccaacgcccttggctgcacgctcagtgtcgcttcgtggaggagaccttctttttccgtgctgcgagcatttcgtagaaagggtccctgctgatggctgctctggagcacagaaaagggagaaaacagagacgtgagggacagaatcagaagaaacacacccaggcaggggattctcaggggcccctcgtgccccagaacacctgtcccaccccaccatcactgcaaaggccaagttagcgtcctccacccttgctgtgtccacacagtgacctaaggtgacacacttcgaaagagacacaggaacacgtgacaagaaaattttggggtttttacctgtttcaacataataatcaattcacatttaggaacagaatcataccacattcttacagctatattccaattcagagaaaaagactggtgcttgagtttccatgatgacatctgactttgctttgcagcagcgagtgccacgtaatcaagccgtgtcacatgcagtcctctggcacggggtgtgtgatagctggcatggtaatgcagtggggccttccaagccccccacgtgcacctgctcagtaactaaggctccatgactctgcaggcggcactgcccagcacgatgctgctggtggggcaccatggacagaccggctggacctggctgggtctccggtgcacagggagggggcccgagctcatgcttgtgctacagcctcaaagacagcagcgcaggccgcgccgcgggctggagcacctgcagtggactggcaacaccacaaccctatgtctgccattctcgactttcaagcaacttatggtctaaaagtcctgacacttaatttctttccagggaagctgtatcctaagtgatgatttgttccagagctcgggcacaagcctcctgactgcaggcagggcactcacccctgctgaacggtggcaccagcagctgctatggctctcctgggctgacctggaacctattcacaagagacagtgtgtccatgagaaaatgcttccgcagctccccggggaatgctaggaactgaagagcactagaaacatgtcccgatgggatctcactgggaagcggtctgaccacctgaagtgctttcacgagggaatctggcggccgggacacctgctttcatgtttggaggtgttggggtgaatctcccttggcttcctgggtaggccaaccctttcgggtaagctggggggttctgcagagaggtgcgtgtggcactgccctgtgtgcagaggcagagtgtcaggcgatgaggggggctgggctgcggtcggacaccaggccccaggcccggccctgcctggccctgcctgctgcttctcaactcccgcttcctcacatgcaagctggagatgccccacctccacctccctgggttccggagagtcaaaaagagatcccatattcaaagagcacatctcagcgcctagccgacacactcgatggcagccgctgttaccgctgacacgcagttctactgctgtacctctgggtacagcgtgaagaaagtcccagcattagagaacacacctgattctacagaaccgaatgctgggaccacccacacgcaggggcactagaactgagggtgctgggaactccaggaaaagcacttcgtgagaggaaaacacgtcctgaacttgacctcgaaagcctttctggcaatactggggaggaggcatccaccagccagatcatcttcctgctcctgttgtcaccaatgtttccactgggaggagtatctagggccaaggacagctgaggctgcacggtggttaccagtgcagctgcatgagtcacactgctcaggtttgaggaccagctccacctctgtggggttttggacaacttactcaactttgctgtgcctcagtgtccctcatctgtgaaatggggataatcctaatggtcccacctcgcactgggtgcaagaaggtttgaggacagtgtgcctgcagagtgccaaagggggtgtctgcagatcccgaggctgaggccagcccgctccgggacagagcagaggagtccagcaagcccacaggagaacttggcactcacgctcatgaaaggattgaatgattctaaatgtgactttgaaaaatgcttagtttttctgactatagaagtaaaaaccatatgaaagacacatgtacaaaaccagccaaaactgttttgaaagaccagtgagggaggacagggaactcgccagccagcacagtcaaaggacaccacgatgccacagggggaggggcgggcggcgctcacgctgggaggcgcggtggagcaacaggtgcatgaagcgtggtgggggagctgggtacactctaaggagagcatatgaagtcagtgggggcgatgccaatgaatccataaatggtgtccggaccatcagctattcattcatgagaacaaacttaaacccttacttcaaatcttatataaaaaatacatttcataatgattcaataaatttttttttcagtatgttaaaaaaaaggataccggtcccccacaacactgctgttttcttccccagaacacagggctggtgccattactggtaggggactctgaaaacaccgtggcaccgcgtctgctcaatggagggtgggctggcccccgctcagggccacacttcccatgatggctgtcatgccagggaagctgccaaaccccatgcccactacacaatctcatttaatcctcaaaagagccccatgaggcagaaatgacctctatcacacagaagaggtaggttacccacctaccaggcactgcgctcagagagacagagcgaggagtctcagcgcagcgtgacctggcgccaaatccatcctctctccagctggttcctgtctgttttcattgcatgaattttcagattacttttgagaggataaatcatctattcctttccctccatcatcacatcatctccatcttcagtcagttttaaggtatttagcttgggccaaaacctacactggtctgagtagaaataccaaaagataaaacaaaggctagaggatattgcacaccctcgggaacggggctgtagcctgggtgggagaaagcccgtcacacagtacacagaggacttacagggaccttcgcagtcacctgtgggcacattctccctgtcttccaggtgaagtcacacaggcagctgaggagtctttctcaggaaaacagctaggtgaactctcatggatgaagcaccaggagggagagggcaaggctgtgctcttaggagaaaggatcactgagagaaggcaaagtcagaatgctcactgctgaccctcgcacagggactggagggaggagaaagcatcactgagagaaggcaaagtcagaatgctcactgctgaccctcgcacagggactggagggagagccaggcagaccaagtcccagggaagaacattaagcaagagaagccaactgactttagaaagccatgtttccagatacttgtcacatgaggaaatttccagccccgtgatagaccttacatggcgtggcccagtggagccaacagagccgagaggtaggagtcagaggcctggacttgggagctccacttcttagctgtggaaccctgaggaagcttctccctcctcccggaccttggatcacggtatgtgacttccagcaaatttcttaacctctatgggcctcagtttcctcatctgtagctaggaaaatggtgtctcacaggattcacaaattacagaacatgactactatctcctctgagctgtcactatgagaatgagagcggcttcgtcagacacagaaagaccagttgagcagatggcatctgtgtgggtagctcactcgcctcttcctattttgggtctatgaggacacgtggggaacccagatgggacgtgctctcttacatatgctataatagccaagaatccaaaggcctcctgggaagccgtcagctgggaaccaggacgaagcttccctaagaacttggagcacagaagagatgcgggcggcatgtttaaccactaagatgatcaacacctggtgaggtgagggctgcaccaggcgcgcactgccctttctcagcagtcacttacttaatgcacttaatccactcctccttctcctcgggcgtcggagctgagatccggtaaacagtgtggttcccctccaccacccgcccgtcagcctcggtcttgcaggccttgataacttggtctttattgtcggggatataaagctcaaagcagttctgagaatcaaaacagagagggagagagtggagcaaaggaagctgttaactgagaaacatgctgatttctttccccaaaacccctttcttctgaccttcacaaaatacaaggaatacatattttcctgtggaaaagtgaagcctagaagcggaattctagagactgtaaattgtatagaagtcagtctcgtttgcaaacacaccggcctgatataagctggccccacttgcaatgtacgtaaaatgcggagagaactgcaggtgactcacgactttaacttcaagccagtaacatcctgacagcccaaaacaaaggaaaactaaacgggaggtgtcccaagggtataaactacatagcccactcctgcgtgcttgccgctgccattgcaggaggggcaacttctacaccccatgtgacattcactaagtgaaacgataaagcagacagacggcacaggaagaagtgatttcgagtctcatctttggcttgaacaatataataaaaaattagactaaataaaagcctgatcacgcttttcagttttttggttttgagttttttaaaaaaaatctttgaaatgcccatcccctttctcccctcaaaatatctcagcaaaaatactcactggttttttggagtcctccacttcccggatactcagattctctaaagggatgattccacggggctccttatcctacagaacagttgaagagaggaagtttaagatcacagtttaaggacacacactgtcagattcctcgccggtgactcagccgaactttcctgctttctcccaggacatgaagttcataaatcagcctgagggaactccttacattctaaacaagaataacaccaaaaatgtctgaggattgtcaatataactgctaagtcctccgcgagtagaaagaccagaagattcaacagacaccgtgagagtgtggccggcagtgacccgggcacggtcctcaagcagggagtgtgcgggcccctttccctcttccctttgcctggctctcccactcacctctgaagcctcagttctggggcaacaactccaggaagcctttcctagtttcaccctagcgccccgatgcctgggactgcagctgtgggtctgaccattaaccactcactgcctctgtccatcgccccaccgccagacagtacaatcctcagagacactgccatcctgacaactccacctggatttccaaaggcaccttgactcctgtccagaacagagctgcacccgccaactagtcccatctcatctacagagggcacggcaccgcagacacttccagcacacgcctgacggcagtttcacagtcccctgatatccagccaacccatggccaagtcctagcactgttaaagtctttatatttggccaggagaatggtgtgaacccaggagacggagcctgcagtgggcccagatagcgccactgcactccagcctgggtgacagagcaagactctgtctcaaaaaaaaaaaaaaaaaaccaaccagttctatgagttctctaaaagcgaaaaagagtctttcagccatttccccatcctggctagcaactatttccaacttcttcaagccaacctgcttggtctttacctctgtatctcacacatctccaaaataccatattagaactgccttttgactgcttgattttagatgttatctacagaagaggactgagctcctcttacccgggcatattcatattccccgtcctcctaaaataactatctggtcatctgaggtagggctatacacagtgtcttcattaacaccacgtttctcttccgacctgtgccatatagtgaacttcctaattttttccttcctgaaaagcttccttccccactggaaccaaaattatggagggtggagaagtgggttgttcctttgatttatatttctgtgaccttaccaccaaaaccaattgcaaatggttaacctcttatcaaaatctccttgctaatgctaatttgtatcaggcatcctattaattttcatttcttgaagtaatccttcctggagcctctgaaacctgttccagtctggactggttgccttgatactcggtaaactgcttcatccttaacctcagcactctccattccagagcactcttccctcctctcttgaaacaagaggtttcaagatctctggtttcctacagccaaggcctttgtcctccaccagcatcctgagaaagggtgtgtgggtggtaacatttctgaaatctcacttggctaagaatgtttctattggaccctcacacctggctgctatctggctgtgcctaacagtctaggctggacgtgaccctcctccaagactgggaagcccagcattcctgccttcagcattcaatatcaccctacacaaagctgttctggttgctggtgctttgcacacgactgccgtcctctgtgtcctcagtgttctgaggccccctaaggaggcagccttggcgtgcattcattttcagtcatcatgcagggtattcagtaagccttccaacctggaaacacatccatcgtttgggggaggtttaaaaaaattattttgtcaagggttaccccctctttgttttctcagcttctctggaacatgctagacctcctggactagttcttctttggaaaataaaagtctttcctttattattttccctctgcctttttattctttctgggagattttcttaatgcttttcttccaacttttccattgagttttcacttctaccatgctttgaatttccaggaggatttttttttattatttttgttccgtggcttcatacaggatcctgttcttgtttcgcagctgtgatgtcacctgagacggctgagtctcttcacagctggtggtggacccttcttcttcctggacccctccctctctctcatccaagttgctctttggctgttcggctgctttggtctctacctgctctcagccggcaggaattcctcaggtatctgggactccttggttgtcccatttgaagagtggaagactaagagctgactgggacctgaagcctgtgcactgtgaccatctacaagggccctctcactaggctgtctgctggggaatctgactaaataacctcacgcatctcttcttgggcagagaagtttcccactctgtctgcaagctacagacctggctacctgtggttctgagagctgagtgaggagaagctgggggtgggagaagtcctcagcattcgagaaggctgcatttaccccacactcctgtctggggaaaatgcccccaccttcaactgggcctagagtccctcatccagaaatgcttggtcagtctctcctgtgagcgagcactcagacttctgcctgggtggtggggacaggccctcaggggcatgaggtgagggcaacagctggtctgtttcctaaacagttctcagccaattctgcttctggtttttaccctccccattctcacttctagggtttaattggtgcctgcaccttttgaggattccgctgggttaactgggttgaggcatcaccaggcgagcaggtgggtggtctaagagtaatcacactttggacctcaataagtatgtgacataatgtatactctttgactggtgaggcctgcggcatccaggttacatatgcatgatgcacattcttgatggaatatgattttaaaccaagatgatttacacccatgctcttcagcctgggagtggggaccaggttataagaagaccctcctggtcaccgggagaacccactggggattctggtatccttcctggccccccctctttcctgctccatcctgcagagcgtggccctcctcgctcttctcagcacactcatcctgccacttgagaattggcttgagtgagccagcatcgcagacaggtgctcacgctatccctcagtgctggagtgaaagaagaatgagaaccactgatggaaacaactaaacgttaagctgctgggcagcaatgtaaaatcccaaatattaaaaaggcccctgcctagaactttcactggactctggcaggcctaataacaggcaggctgcacccctcagtgatgacttgtgtgtgcccaataaccactcccttcccctgtgaagagggaaataaccgaggccaacgtctttggctttttaaatttgtctttaagaacaatcactgttgctgtaaaaatacgaattgcttattataaagaactaaatattgtagaaaagaatacaggtgaaaggtttaaaaatactccaaatccaatcactcctaaattatcattgctgacattaggtgaagatattttgtgtgtgtgcagagagatggagaaaaacaggttttatgaaaatgggatatttcgagtggtattattttcataaaacacattctattttaattgtttagaatttaacagggggaaaaaaggaagcagaaactgaagaattgttgaacttcaaagtaaatgtttctttaccacaagagttcctgaaataaccttattcaagttaagacaaagaagtttatgaaaacattaagaggtctgaccaggcatggtggctcacgcctgtaatcccagcactttgggaggctgaggcgggcagatcacgaggtcaggagtttgagaccagcctgaccaacatggtgaaaccccatctctactaaaaatacaaaaattagccgcatgtggtggcacgtgcctgtaatcccagctactcaggaggatgaggcaggagaatttcttgaatccgggaggcggaggttgcagtgagccactgcaagatcgtgccactggactccagcctgggtgacagagcaagactctgtctcaaaaaaaaaaaaaaaaaaaaaggttttacttattcttttaaaaaatacaacatgcttccattttaacaatatttcttgactctgcattttaaaaagtacaaaatcttctaattcttcacattgttcctcctcccacctcctgatttttattatttcacttttacattgtccaggtttataacattcatggtacgtcctgcagccacaatttctggttaattagtatttgttttatatttaagcatattttagtattagctctatatttaagtttatttagctattacttctatatgagtatatttagctattagttctatacttaagtatattttggtattagttccatacttaagtatattttcgtattctgaacttaagcatattttagtattagttgtatatttaagtattagttctgtatttaaatgaatagttcaatgctcactaccagtcttttacttcccagggcctttcttgtgattcattctcttacgtgctggatgttactgtcaagcaatttttttttcaagaaggttccaaagtgccgcatttcacatgttttcttcaggagagtgcggccagctgtgctttacttaaacaataacgtggctggataaagggtcttgggtcattcttctcttcaaaactgtgcagaccttgatactttaatttctgggactaaaagctgctggagatgatctgctttttccaacagaacgaccagacacttggctccaagttcaatggtctaaggggccaggctttggagcgaccctttctgtaacagtttcctgaaatacggtgtcttctttgatttgcagattcagggctttttcctctttctcagggaaatcacctcatgccacactgtatctttgattctgcagacaccaattactctggtattattgggatcgtcttctgttctctgcatctgctagcttttctctcattgttttaatacttgtctttttcagatataatctctgtgattggctcaagcgtttaagacattatatttataggacatgattatattttcagctaatttgttccactccttaaagttttaacttacctttaagaataaataagttataattctatgattatatattaatggttgcactgtaagtatatgctattgcttgggttctcacttgtttgaagacggaaaccttgcttttctggccttccagctggctctggtaaatctgtgagtgacccctggttctcctcctgtgaatctctgatctgcttgtgtccccctaaccacttaccctgacctgtggtgggcggccaggtgttctgcattctagcatattatgcagtctcgtagagaatggtgagtggtgggagagctcatcgaagatactccccgagttctggtctttcctctcggattgtaagtatccaacgtcagggtttgctccatctatctgggcagcagtccccagcctttttggtaccaggaactggtttcatggaagacaatttttccacggacaaaggcaggggagggaagatggttcgggatgattcgagcacattacatttttttaagttaattaatttatttatttttattttggggggcacagttttgcttttgttgcccaggctggagtgcaatggcgagatcttggctcaccgcaacctccgcctcctgggttcaagcgattctcctgccacagcctccctggtagctgggattacaggcatgtgccaccacacttggctgattttttatttttagtagagacggggtttctccatgttggtcaggctggtctcgaactcccaacctcaggtgatctgcccaccttggcctcccaaagtgctgggattacaggagtgagccaccgcgcccagcctacattacatttattgtacactttatttctattgttattatactgtaatatataatgaaataattatacaactcaccatgatgtagaatcaatgggagccctgagcttgttttcctgcaactagatagtcccatctggggctgatgggagacagtgacacccaacatgtgttgcttgtgtccagtctactctgtaatcactctttggctgctgtcactgcagaaaacactgcttcacaaagacaggatgttgggcgtggaagcaggctttcagtgcttttggggcaatctcaggatattctgcctcaactttaatccagaacatatggagatttgaagttgtctcaaacgtacttttaaggccactgtcatttgcgatctcaagcagttgatcttcttctagcattggccaaggtgattcacctggcttattctcaaatgggtcacagatccattcctttccagttcaggttcttttgtggttgggaagtatcgctcaagctcttctgaaagctgaggcgctggggcaaagaaggccctggctccgtctctcacaatctctctaatgtttgaaacatgtcagaaatcccagtgttcactcatcacccctgtaattccagtttggctttgaaagcagccacttgatctgccgactgggacacacttgtcactctcccctgaagtgacagattgagtttgtgagtaggtttaatctgtcacacaagtacacaagtttcctgacctatattctgtgtcactgaaatgtgctgctagtggtgactttttctagaagaaatctctgaagtggctgttgcaactcagaaactctggccagtgatgtgcctttagagagcgtctcactctgtgtatcacagaagccgtgtgtgctctgcgtccatctcctccgagggctgcatgaacagacctgagttaggccatgtactttaatgtggttggtaatttcaatcgcatcctgcataaatgttgttaagttcaggtgacactttttggctagccagcacttctctatggatgacatactgcatagactcacatttagaagtgacctctttgacctgagtagtgaaaccagaaagctgtccagtcacggcagccgctccatccatgcatataacaccacaaaacaaaacagttcagtttccctgatatgtaataattcaaagacttgaatagcagccgtggtgttggttggcaactaaagcacacataacatatcctcatgaacatccccctgaaaaatatgtcacagaagaacaagcattgttgtcttgttgtcaacatcggtagactcgtcaacctggattgagtaccagagtgactcgttaatcctctctaacaattgtgcctcaatatctgctgctgtttcatcaatctgcctagttacggtgctggccgaaagagcaacatgtgccaccttttgaaccacagcctctcctaaaagcgcatgacaaatgtccttagcagcaggcaggatcaactcttcaccaacagccagtcctggctttggcaatgcggttagacacgaagaatgatgctttcagcgcagacatatttgatgaagtggtggccttcaataattgcttctgttcttgatgtttacatttttttcttttgaaaactccaaaggcttgtcttttgatgcagggtgcttggtctccatgcggtgaggcagttttgaagctttcatggctttgttgggtagttggtcaccacatattctacaaagtgggcttggcgaatgtgatcacctgttgaaatgaacctagaatttgagtagaactcttggcgttttctttacaatgcagctttatttttgttggcagtcttggcgtgttctgctgtctcatcaatgggtctctcccccttttcaaagaagctctccagtgacgtttggtttttactcattttggctagggttggtggatgggcttaccaaaaccatggctgagacaagtacacagtgtgggaaagagatgtggatggcagtggtaaataaaataacgggcaggccatgcacggactgaaataagtgttggattctgacttaaagcctgccaccagatacagctgtacaattgaagtacatcagctcacttgccactataaagcctgccaccagaggcaggctaattgtcacttgccactcactgatagagttctgatgagtctgcaagcaactgatgtattattatggtctctgtggagtcaaacctctctgctaacattcatctgtacttgcagctgctccccagcactagcatcactgcctcagctccacctcagatcatcaggcattagattctcaggaggagtgcacaacctagatctctggcccatacaatttacaatagggttcgtgctcctatgagaatctaacgccgccactgatctgacaggatgtggagctcaggaggtgatgtgagtgatggggagcagctggctgtaaatacagatgaagcttccaccgctcgcctgccactcacctcccgctgtgtggcctggctcgtaacaggccacagactggtaccgtcctatggcctgaggttgaggacccctgtatttggggatggatatcatgctcatgggagaccctccatggacagtcttccccagtgaatatacagtcttgagcctttacttatgtctataacggctgcttttttcacttttcccatttcaccaatgtccacccagcaggggattttactactccttgatcagggaggaaaaaataacaagtcctgttcagtttgcctcctcccagacctgagaaaccagcgagactgccgggtctcctcaaatcctgggccgtgaggtagaaaccctgcacactgctcctgactgctgcccctgccaccgctgcttccgctgctgcccagggctgcagtgcactgaattcgttctgccccttcccctgcttggttgctatttttccctacttatttttttactagtcttttgctctgttaggtaattctgtgtggaagtttcaatctaccatcttaattctgacagcatcctctctgtgtcttaagaaatgtattcagcactttggaaggctgagatgggcggatcacaagatcaggagatcgagaccatcctgactaacacagtgaaaccccgtctctactaaaaatacaaaaaattagctgggcgtggcagcagcgcctgtagtcccagctactccggaggccgaggcaggagaatggcgtgagcccgggaggcggagcttgcagtgagccgagatcgtgccactgcactccagcctgggcaacagagcgagactccatctcaaaaaaaaaaaaaaaaaaaaaaaaaaaaaaaaaaaaaagaaatgtatttactgctgggtgcagatcacctgaggtcaggagttcaagaccagcctggccaacatggtgaaaccccatcccatctctacttaaaaaacagaaaacaaaacaaaaaaaaacggatgtggtggcgcacgcctctagtcccagctactcaggaggctgagatgggagaatcacttgaacccaggaggcagaggttgcagtgagctaagatcacaccaccactacactccagcctgggagacagagcgagactccgtctcaaaaaaaaaaaagtatttttctctgtatttccattgcttgataaaatgctacactttgctgaataaatattgctgaattaaggattaaggtgacaccactacggtgggcatcacgaaaaaccacaagattctagaatctcgtagcattgctataggattgtccaggacttagaagtacaccacttagatgcttatgtatcattttgacccagaaaatagcgagacaaattcagacacgatgttaaagacatcgttagtgtaggtgtcttcagaaaaaaggcaaaatatagggcagaagggtgaacaaaacagaaaaaattgtaccaagatgttcacagtggtactttgggggtgaagcagaaagcagctttctttttattattttgcagatatttgaagtgtattactctcatatgaaaagactataacaacagaaaagcaaagccagtgcagaacttgcagggcatgagctgagcccctacaacatatgaaatcccggccagaattcccttcacagtgatttactatcctcagtcaccaaaccatcagaagcagcggctcttgcctgcagcctgatgggctacgaagtgcattccctgggtgagaagctgcatgtgcatgatgtccatggggatggagaacaacgctaagtgttagacacgacagaaacccatcttcacacctcacagcagaaaatgccaaggcgtgtacctgtttcttggtcctaaataagtgactggtgaatatggtcaggatttcaatgttttacttaagccccattttgctctaaactgattttaaaagatacttctgagtcttaattttctcagtgggatcaatgacttttgctccatgaagatacacttggagaacaaaagcaaagcattctcaactcaacggccttgatttactttaagacaaaagttcgatgccatgggagtatgcccgctttgcccttacaatgaccaagaaaggtggcagaaatgaaaaagcaccccatcaccagtccggtgagccacggtctccacaccaagtgctaacttgccagggttctgggtaccttgcttagagggagctctgaaaagagctaatttatgatttttactttctttggctattattacaaaagagatatacgtatataaaacacaaatttgcagctataagtctctcccactgaataaaaaccaacaaaacttcttaaaactccagataatctcaaattgacttttcccatttcacttcacttccttttcccccactatatattttaccccttgggctgtttcttctgaaatcacatttctgctaacccagaataggtgaattttctaaatcacgattatttcctttttcttttcatctccctttcaattagggccacatactctttctcggcaaccaatgcaaattcattctttctagcccagttccaaaacccatttctagtgctccccctcctccaggccaggtatctcctgtcccaccagaaccgggtgcctgctctgagcccgtgccctttaaggcacgcacctcttctcaggggttccccattctgagatttacttcagttcttgcactttgcttaaactctcccccatcccccacagatactgaagggcaaatccaacggtctcctcaaccatgtctgattagagacacttggaaccggaggccttgcccatccctagtctggaggccgactagcaggtgctcaccgtggtatactcaaagtagtaaaggcagttgtcagtcagaatgaaccagcgtctcttccaagtctttaccctgccacctgcagagcaaaaagagatgcacgttcgacaagagacaaccagacaagtgcaggctccacgacacacacgacaccctctcttctcagagagggttgggggagaggcatcaggagaacgtggagcccacaacattgacatcagtaacaagacacagagctgaaacagaagcgtctttcacaaagtgaaagcctgtgggtacaagcagagcaagcgcatctaggtgacacccggagatggaatcgggacggcaggatgagcatgggtttgtggcgagaaaacccggggcaataatgacatacaatgcaaatttgccagagtcagcaaaaagcctatgtggtagaaattgccaaagaacagaaaaagagggaagggtcagcacctagtgcaggctactctgctactgacaagcagcccggcacataaggagtgtttcactggaagtgaaggaaggaggaagcaggaggggagatgctgggagccttcaaatccacactttccctggaacacgaagtaaatccccatggttctactctcttcttcaccttcatgattacagtgagcttctacactggctcttaaccttatgtgctagtgtcctgaaaacaaaatctcccgggtcctgggtgagaatcaaagcagaattcctctatcaaggaagaatcaactcgtactgagaggtggcctcaggagccttttccgttctgggcttctcacctggagcttataacagaaacagctggcaaatacagccatggcaaaacaagctctggcggtggtggctgggaggctggcaagggcctcccttggttctttttagtatttctcagcacaaaacactggggtcatggctaggcacaggggctcacgtctataatcccagcactctgggaggtcaaggtgggtgggtcgcttgaggtcaggagttcaagaccagccggccaacatggtgaatccccatctctactaaaagtataaaaattagccaggggtggtggcacatgcctatagttccagctactcaggaggctgaagcatgagagtcacttgaactgggaggtggaggttgcagtgagccaagattgcaccactgcactcccgcctgggtgacacagggagactccctctcaaaaaaaaagaaaaaaaaaagaaaaaaaaaaaagttggggttggggccgtgaagttatgctgagacagacatgaaggaaggaaaaatttccccaagcctatctgaatgaagctacacctgctgtcaaatcgggaccacaggctttctcttcctccacctctctcccatcaagggaacattttctgaacatgaaccactcaaaacttatccctaaggccttgacctgtgaagctatgcatggcattctagaaacacttcttgtgcctgctcttttgctaagacttaacctacagacaataccgcttctccaatcttcctaaatagcaaggatcatggggcataaatctcatacctccgatcatgctttctctcttgccctcatcacaaatagctgagcaaagaggagaatggttttacagggattattctaactgccaggacctgcctgcatgctcacaccagagaaacctaaggggagtatgcaaataatgttatgaaaagaaaatgtccagcgtaggtcctggcagacaagtaaaaggaccactggactttcaggccagtttttagcaccctgcttggatgctgaaccctaggcgggcttacgtgactgatcattaattgccaagattccaaatgacacagatctaggttatgcgagggaatttgctgtaagcaagcacgtgccctccacctgcccatcctgtgctatatcaagcaaattgagactctccctccagtaacttctaagtttcatgtgagcccttgccactggtccctaaaggttagatggcatgaattaagagaaaaccataaatggatactatgacatgcatgtggaaaacaggaaagcccgggcagaattaaataaggaggataaagaaggcaaggactatattcaggattgaagccaatttgttcttaaaaaggaaccccctccaccaattcagagtctgagaactttggtcttccagcctggcgggccattggttgcccacggaggctcggcacaaagggaacatcaacccatgctgacctcccatgcgctccatcacaggacactacccggggaacccttcggacataggagatcatggaaaaagcgagtcagatgctaaaagaaacaagatggaaagaaatcaaggagaaaaagcaaagccagaagaaattctctgcctgattacaaaagcttggttattatgcctggacaatttgttgcattacagagacctctaccataaagcatcactgtgggcccacggggaacatttccacgtggaaagaaaagcagacatgaaacaagcagacagatcaatgtgcgcctaggacagtccctgtggaactcacaggaccacctcccactgcacggctcctcaggcctcctgtgacctccccgagacatcaaggccggatgccatcttcccctacagttgagaacaacctgacaagtccctgaagcatctcagtaactgtgcgtgtttggggttgttctttttaagtgtagctactgctcagggaatgcttaggcacaaacctgaggggtcttgggctaagaaaatatgtttccccaaaaaaaccagcaaatggagaggagacaccaaaaccataaccaggagaccgattcggggctttaacgaggactcgctgaaaaagcgagggagcaaaacaaaacataacaacagagccgaggctgttaatacccttctctgatccccaggaaactaaacacgaggacttcagggagggttttttggtttggacttgtttttttcaccttcactcggtatcattttgagtttaggaaataccatttccccttttcgtgcaaaggcaaatgtcttaagtatcatctaatttagttctttccctagtttgcttttccatcatggtaaatcagaagctttccatagctttgggaagtcaagactttgttctctctggagtaagtctcagcttgaaaaaagaagaaaaaagaaagacttccttctcttctttctcctcttccccacgtcagagattaactttcaatcaggctgattaatggacgtcaaattgaatatcaaacatagcgcatgtcttagccaataattccaagtgaaaatgtcatggaaacttcctctgcttttacaaacccactcttagtatgttttcttgcattactgcattcagtaatgaatataacatatactcctccaaaaaagaaaaacgaaaattgctccaaacccctgatcctgaccagttccctagggactgtacaataagttagaagcagcattaacactaccaccggcaattaaaaaacaaaataaccaaaaataacgaaatcagaaaatgctgcagtaatgacagtggcctagcagagcgagcgagcaggctgagggttacatacctcctggagtttggggcaaggaaaaggagagccaaaatcatggaaacatacaaatgagggagaaaagaaaattaaaacaaagaaattaaacccgattccttaatcttaaagtgcaatgtatcagtcacattcatgcctgcctggggagagagctgaactaaaaacactcaacgggcaaatgatcccactactgtctggcacgtgaacgaggggctcttacatgccacgttccacctcatcaaggcaagatttgaggcactactggaaacctggccccaaagatgccacaaatcggcttttacaaagccaatgtttactagtatatccagaatcagagcaaagaaagctaaggttatttcagggaaaattaaatgtctttcttgagatggctgtcactttttaaagtgtgtgtaagaatgcacacacatatacccatgagtacacatgtactgatgtgtatacacaagaatacacattcttatggctatatgcatacacagacatatacacacagctacagacggctggaagccctgccttctgcagcacataaacacaaagagtgatactaagtgtgctacaatgaaaacacaatattcagagtctagaaggatttgatggaggtttagaaaaagtaatgcaatgagctaaaactgagtcccacacttggttaaattttctcttttttaaaatacgagatgcctcatgaatttgcatgtcatcctggtctaagaaccaagataatctttgtactgttctaattttagtatctgggctgtcaaagctaacacttagtattagcatttaaacaaatctcgctgtagggggaagtaaatccaaacttgaacacactttaaacgtttccagtaggtttcctttcaactccatccacttggcaataggaatgtggaagggaaggctgcctatggggttagtaattttagagccttaacttcaaagattctgggggcttaaagatatataaaatgatggccaattcaagagatatttaaaactgatcggtgaagtggtgctgtaaggggaatttatgaattaagtcattatgtataagcacaaggacttgggatatgactttaaaaggaaatataaagtctactgctatctgacctagtcagaaataaaggattccattttagccttcccagatgtgtcagtaatgaccaagagagtactgacttctaatcactggggcaagcagttgggctggtataggacggaacagcccctgctaatgtgagaacccaactcatcaaaggctaaagcagaaggcaacagaggaaagtaccctgctagtgtccaaaaaaaaaaaaaaaaaaaggacatcattatgtccagagagtctagagctctatgttctgaaaccattaataaagtaaacacatgtggacatgaatgtgtatgaaaaccctactaaagtctttcctattgattaccctgtcaccttcacggcaaggcatgaccacaaatctcagcaatacaagctcatcacttctggcaaagggaagagaaatgcattttcagcttttctaaatgaacaaaataattaatgtggctgattcagattgaaaaggaggggaaaaaaaaaagaaaaaaaaaaaaccactgcccaagaatgagtaagagtgctgtggattgagctgcagccaagggctctaggcttgccatgcacactgcctgtgggggagccagatgcagaaggaagtgacgatgcactggggtgggggcaggagcgccaggtacaaatctgtgggatgggaagtagaaagatggacaaggtcggccaccctcccagtggttatggggacagggaaggcaaacggaccaggtgctcagggaactgccttgaaacaaaacctggtcaaccaattcaagggtaaaaatgtggagcacagacacatgtgggcaatatttatggtggagtaagtctgtccccagtagtctctgtgtcccatgggggcaatgactatgaagtcacttcccttttggaagccgacctttgttagaacagaactcataccaaagtctctctggagtcctctataagccaccccctttcctacatggtgcgtgtgtgtccatgaatgtgtgtgaacatgcatgcgcgtgcacacacacgcacgcgcacacatgcacacgcacaaacacgcacacgcgcacacacgcacgcacgcacacacgcacacacaccgcctttcttcctaagtctcagctttaggagccctgactcagaggtgcgcttaccgagtttcaatagccagccttctcggtctggattgaagaaagtgtgagtgaggtcattcccgtcgtcttctgggattttaaagggttcattttttatgctctcatagagattctgggataaaagatgacaatttatgtctctgattctagaaatattttttcctcctcccctttctcttcattcattccacaagcattcatgtgcctatagtaagccaagcctgctagatgctgagactagaagattatgaccatttctgctttcaggcagctcacagtgacaaaataaataagccttcccaattaggaaaataaagaagcagcctgacttctattcaagcttttagtttcatgtttacaaaccactgtcccctccctgattccctagctgggccttactaccactttcttaatgaaattcacatggttaaacaaattaaaagaggagacccttgataaattgtatgttttttcttccttcctacaaaagacgatcctgttcccagtgaactctttcttgacttgaatgaagaccattcttccttgcttacccggaggagctcctccggcaggtctcccccatcattgatgcctcggttcatggcaatgaacctctccacagtgggcttatctttgacattggggttgtgcagactggtgttcaacatgatgatggcaaaggagaggacgtaacaagtatctaaagatgagagaaaagcaaaggggagccgttgcatgctcagatgttcagaaacatcccacccgcaagagcaagagtggtatcagatgaaatcaggaataaaaaaccatgttctcggccagatgcagtggcttacacctgtaatccctgcactttgggaggccaaggcaggcagatcatgaggtcaggagttcaagcctagcctgacccacatggtgaaaacccgtctctactaaaatacaaaaattagccaggcgtggctgcacgcgcctgtaatcccagcaacttgggaggccgaggcaggagaattgcttgaacctgggaggcagagcttgcagtgagccgagatagcgccactgcactccagcctgggcgacagagtgagactccatctcagaaaaaaaaaaaaaaacatgttctcaaaagaatgagatgaatccacatgtacgggtacactccagggcacactgctgtctgaaaggagcaaggcacgaaaaagtatataaagtattcaagacttaaagctgtttattttttcagattggaaaggagaatacacacactgtagaaactctgaaaaacacaatgtgtttaaaacaaaatgacctgtaatgacccataatcccactatctagcaataatttattttgctttatttcctctacgtaaatatgactatgtataactcaccacatatttatctcacagatatatactgtaacaaaactggaaacaaacaaatacatacacatgcttttttgctaatcttaatatcattctcctatgtcaataaaaattctttgtaacaatatgggtttctttagtttttgttttgagacagggtctcactctgtcacccaggcttggagtgctgtggtgcaatcatagctcactgcgtgtagtcgtaaactcttgggctcaagagatcctcctgcctcagcctcacaaatagccgggactacaggcataagccaccacacctggctaatttttaaaaatttttttggagaaagggtctcataatgttgcccaggctggtctcaaactcctagcctcaagcaatcctctcacctcggcctcccacccaaggtgctgacattaccagtgtgagccactgcatgcagctaaaacatggtttttaatagctgtgtatttcgtagttcagaggtaccacaatttaaattcatagtgccttaatgtcagactttcaggttatttccaacattttactattataactatcattgagtaaacgttcctaggcatgaatctcagcccttttgttttagaaattatctggtgccaagaaaataatccagtgtaaaacgcccatcataaactaggatgaatgatcgtatttacccgtggactggaacacgccattattgcactgacaatatcgctgggcaaacgcctccatcatccggtcgatcttctgggcctctccgggtagccggaagctccacaggaactgcctgagtgggtaaagacagagtgttccagaacttggggaggcaatttatttctctatgaattgttaaactgccaatgattttttttttctttttttttttgagatggagtctcactctgtcacccaggctggagtgcagtggcgtgatcttggctcactgcaacctctgcctgccgggttcaggcaatcttctgcctcagcctcccgagtagccgggactacaggcacacgccaccatgcccggctaattttttgtatttttagtagagacggggtttcaccatgctggccaggctggtctcaaactcctggcctcaagtgatccacccgcctcagcctcccaaagtgctgggagtacaggtgtgagccacggtgcctgaccactgccaatgattttttaacatcaaagtgcaaagggaaccctgctgggctgcagccttctgttactgtaactctgaacagatgcaaagttgccatccacaccactgttaccttaatcaaaagtaaaatttttcttaggaaaaagtgaaaaattaggagggaaacaatccctactgaggagtggtttccctcctcagaataatatacaagactgaaacatagataatgctcattttaaacaaacgctatttccggaaacaatatgggtggcagaaaaagagaagattgtcttgtcaaagcattaacaatcgatccctttaagtcaaagaaagaaagacccacagctgacaggtttaattgtggattgtttccatccagctaaatgatagcacaaaagatgaagtcattatttacacctacagcagtgaaaatacagaatgacagtttcttaaaaggcatgaggtaacagatttaataaaaaattaaggtttacttttttctttccaaaatgaaatgtataactacttattccagggcaagaaattaaaggattttctaaactgaaaaatttcaaaatttaagtattcatcaatttctaaaacctcaaatataagactcaaggaagagtgttacagaatcggcctccagaacgtaacagaattgaattccccttgaccatccagtcattcccagtcagagaccaatagatttcttccctccaaaatacttcaaaatattcaaatcatacccaaagatataatttcaataaaatgccccccaggacagactcatgatcaaaggctagcctcccactccttccaaaggggctcacctcaagaatactcaccgtagtgcctggacgagattaagatcagtgaactcatgcagctccacaaatgcatgaagaacctggatattaaactcatctctatcgagaaaagacaaaaaatgggagagaaagcaggagtcaggcaccaacactgagaatctccagccaggccatgtctcctacactgcgtcctgtggtcctgtggctcctgcccagacagccacttgtgcacactgtccgcaagaagactggctagctctgctgactggctgaacaagcaagatgtctccatgacccccagaaaagacccatcactattccccagaaaagcctcccctcaactccagtggggctacagatgctttaaggcaaaaacccctccaagaacttcagagtatttgggagtttgtttctttgtgtcgttcctgaacagccttccctagcatgcgcataatccccaaggccttacctctcccctaggtagtcgccgatggctgtcttgttgagcccttcgcctttatataagaactgggcaatgtcttcacaagtgttcttcaggaggtcgttctctattaagaactggatcccctagaaaaagacaacaaagacgccaatgatgctttgctgggaaacagttgaaaagaaggggaaagggcacaggaagaaatgggtgtgggtgcactggaatatttaataaatacttgctaagtgacctataaagccggggagtcacagtttaggaacaagggcttagtgcataacatttgctctacaaaacggcaacatgaactgtaacgcttggaaaaaaacgtttttagggtctatctgagcactataaaaaaaccccatctaatatggaccacttcccgcttctttctcacttacctttttagggtccatattaaattttttcctgcccatggctacctgtttgttcctctgcatgtttttcctgtaaaacaaccatcacagccattttagtacttcaggccatcggaaaggcttgaaagactaatatgatttccactgatttacacaggtttttgaaagatttatccaggaaagcaacaggcataatctggtggaactatgaaaggccaactgaaacctgaagcctgaacctggctccaagctccaagctcatttgctccttctaccctggaacagaggttttctttatttttttttgagacagggtctctctctgtctgaaggctgaagtgcagtggtgctatctcggctcattgcaacctctgcctcctgggctcaagtgatcctcccacctcagcctcccaagtagctgggaccacaggcgcatgccaccatgctcactgtgttgcccaggctagtctcaaactcttgggctcaaatgatctgcctgcgtcagcctcccaaagtgctgggattacaggcataagccactgtacccagccagttttctttttttaacatgatttttaaaaaaactttatcagggtaggccgggcacagtggctcatgcctgtaatcccagcactttgggaggccgaggtgggtggatcacaaggtcaggagttcaagaccagcccagccaacatggtgaaaccctgtctctactaaaaatacaaaaattagccaggcatggtggtgggcacctgtaatcccagctactcgggaggctgaagcaggagaatcacttgaatttgggagttggaggttggagtgagtggagatccaccactgcactctagcccgggtgacagagtgagactccgtctccaaaaaaaaaaaaaaaaaaaaaaaactttatcagggtataatttacttataatactcctactgtaggtacatatttgaatttttagtatacttactaagttgtgcaacatcaccataatccagttttagaacattttcatctcccctacagaattcctcacacctttttacagttaatccttacttctacctccatccccaggcaactattaatctattgtctgtctccacagatttgcctattctggacatatcatacaaacagaatcataaaagatgtggattttcagatctggcttctttcattagcataatgttgtcaaggtcatggtgctggagcgtgggccagtactacatgccttcttgctgctgggtcatcttccatggtatggataaaccacatctgtttatccattcaccagatgatggacacttaggctgtttacagtttgggacaattatgcagaaggctgctatcagcatttgcatatatgtctttgtgtggacacgttttcattttccttgggtagatacccaggggtggacactgctgggtcatacggtacatctgtatttaactttttaagaagttgctaaataataggcagttttcttgactgtatcagaatgaaaaatgcagattcacagaccaagcttctcaaagtctggtccaccaaccagcagccttgggagcatatcagacgtgaagacgctccgctcgtttatacatacacgtcacctggggcctcaacaaaacagattctgactctatgtctgagaaggggcctgtgcttctgctgtatgtttaacatgatcccatgtgtggagtctgagtagcaaggccctggaccggctgagtaactcagaagtacaaggggcagaacctaggaatttgaatttttaaaacctcctgcagtaattctggtatgcacccaaatttaagaaccactgccatcaatatcaatagtaattttataatctccgagagcaaaaaagttgctcggaaataaaatcataaaatgttattgccttaaagaacacatgtgttctctagctaaatccatggagggaagaaaatattcctaagtgttttgagggttggtgttttttgtgtttttgtttttgttacaggcagggtcttgctctgtcacccaggctggagtacagtggtgtgactgtggctcaccgcaacctttaactcctgagctcaagtgatcctccggcctcagcctcctgagtaactaggactacaagcagatactaccacaactggctactttttaaaatattttgtagagacagagtcttgctatgtaacccaggctggtcttaaactcctggcctcaagcaatcctcctaccttggcctcccaaaatgctggtattataggcatgagtcatcgcatccaggctgttttgaccttttgaaaggaacacctgaaaactgtgagtagtatcagaacttccaggtgtaagataatctgggctcccctgtcaacagctgccttaggaaacaaagtcatgggggaaacaccatttaatttcagccagaatgaagggttatgaccaggtatctagaaattcctatttaactaaaatgattgtctaatcatttttttctaaatccaggaagattactttgatcagtatttccaaacaaataccacaaggaaggcctgtttcatggtttccagtgtaagtggtgaggcagcgtcagaggtgcccacagaagcaaggggtgaaactcctgggaatgctcagcttcctgggcctcagtccagtcctcaccaaaggctttcctgcagccaccagaacgcacactcccagatatccgccagtcacagtctgtgccacatgactgcctgggacacacaccagagatggctccctaatttcattagctagccagctcacttctctatctgccccacttggagcccctatagctctaggccttaggcagctacttctctaagtggctttccccagcctacacaggtctgacaccccagttaaggtgtccaaaggaaaacagcttactgctactggatcgccttagttaactgacgcgtatacatttcagaaagtgaaatcctgtactacatgagtatattatttctgcttgattaaatagtatttaggatcattcctacaaaatgcatcagatcgtcgatgagaaacatgaattctctcctataagaaagtccgagcaaatgtaatgcctgcttgagaaacaaatgcagggtgagcctgagtacccgtatggatggatcctcagggatgtgcagaatcacttccgtcttggcgctttcgataccggaaaaccattttaagttccagattaaaaaataataataacctaaagactacttcctgactcacaacttcagatgcagttcatgagttacaagtcttcccaaattcactggctgagtactttggatgcactcacgttcctggtgtctgcgtttccttgctgttctatggtaactgacagagaattaatcaagagaaaaacaaagggcacactgaattctgaatatgtgtgtgcagacaccggaatatacagaaaggaaacgtaccaaaatatgaatcctgattatctctgggataagtgtttatgagaaatttgttttttatacttttctgtattttaccaattttctgcagtaaaggtgtattacctttatagtcagaaaaaagccatttttttttacatttttaagatcgaggtaaaatttacatttaacaaaatgcacacaccttaagtgcacagttcaatttgttttgatgagtgcatatacccttgaagcaccactcagattaatacagaatattcctgccatccctgtaagttccctatggcccttcctagtcaaccccaccccaccccgccccagcaaccacctcggaggcagcactgtcatgatttcggctagcacactagcacagcttagtttgcatgttctagatgctcacgcatggaagcacacggtgcccacagtttctttcactcatcacaatgttcgtgagattcatccgtgctgctgcacgctagcagttcattccttcacactgctgagtaatagtctattacctcgacctgtttatccagtcacctgctggcagccattcagggtatttccagcttttggttattttatataagaatgctatagatattcttgtacaagtctttgtatggacatgttttcatttctcttaagtaactaggagttgaattgctgatgaaactgccaaacttctttcccaaatggttatattattttattctcactagcacttgccaacatgaggtaccatcagtctttttaattctagccatcataggggatgtgaagtaccgtttcatggtggttttaaattacatcccctacaactaatgatgttaagcatttttcatgtgtctactacacatatggcttcttttgtaaagtgtccaagttttttgcccattttcttatttgggctgcctttctatcatatattctagatacaagtcctttttcagatatatttgttacaaatatttacttctaatctgttgcctgttcatttcttttaatagtttttaatagttttatcttttacaaaagcggaagttttaaatttttatgaagtccaacgtatccgtttcatttaagctacgagtgtttaaaatggaaagaggggaaactaatccaaaataccaaatggacaatacagagactggccgtggtgagctggctgccttctgtggaggactcagcctcactataccctgaaggcactgcccacaggagtctaaaacaacaaatcaaacagtcctacgaagccagacaggaagacttaggcttagaaaaatacagacatgtagtgaattggaaacagctcatttattgcattaagcagtcagaaaacggtctgggaaccccattcaaaactaaactctcaaagtcactaacatttcatgaaaataaaaggaaaaaaaaaagcagagtccttgtccttttatactatcatcgcatttctacattttcttcccttaagcattaggaaggtgcaaataagctcacgattatcctcagacatgactggacactccagccctttgaaatcgtatcagcagcattcattaagcttttcctttacacaaaggaaaaacagaaactttaaaatgcacaccgacagtggacaacagaggggagtaattcacataaaaatttaggagcagtttaaggctttctgggacctttgaagttctccagttcaatttttttttttttttttgagacggagtctcgctctgtcaccaggctggagtgcagtggcgcgatctcagctcactgcaacctccacctcccgggttcaagcaattctcctgcctcagcctcccgagtagctgggactacaggtgtgcaccaccacacccgtctaatttttgtattttgagtagagacagggtttcaccatgttggccaggatggtctcgatctcttgacctcgtgatccacctgcctcggcctcccaaagtgctgggattacagccgtgagccaccgcgcccggcctccagttcaattttttaaacactggaagaagctcctatgttcaggaggccttgcggtgaaggatggaaggcagacattatgggtgtgtatgtgcttgctagaattagaaagacacaaagctgactttttccttcaatgtgccacgtaagcataattaaggcctgggtgctttaaggaattacaaccacagaagccacctggcagcagggcagactcacctttcctctgtggatcccaggttttcaatttcattagctacttctgctatctcatccttcagcctctataaaacagacagtccagagtcagcaggaaaggcagatgcagatcaaattaaaacttctaaaatctcacataactccctccaaccaaaaacaaaataaagcaaaatgaaacaaaatatgacaaaaatgcaaaaagtaaattaggaaaattcatgtttcagaaatatttattgagtgcctaccaaacagtaagcattccagaaaacaccaaggtagaaaagaatacagcctctgacctcaaggagtttacggtctaggaaagtttataagcatatatgctgtgtgaaaaacaaaacctggctgcctcatcacaatctttcagaacaagtctgcagcttactaaacacaagcatgccagaaaattcagaggacaaagtctcctacccaaagcccaggctgcagagcctgcagtagctgtgccagggcaacaatgccaccaagcggctggcaaagggaatgtctgatcaaatcggctgtgcatccgcacccaccctcctcattccagcacactgttggtcagaatggatgggctctcacggggaagtggggcttaagtggagagctgcttagctttctcacgatctaccagtgaagcagaaatcaaaggatcagggagaactatcaaaatatacttaaatcaactccagagaaagtcaagtctttcctcattttgctactttgggcaacaggattccctccttaaccccactcctaatgtcttgtgaagaattctgaaagaataacatttgctgtcttagggcgaaaataatccaactattggcttctagacttatttcctacaagcttgatagttacaaaaaggaacttggaaaaattgtaattgtaaaattgctatcactaagtacatctatagggaccagaaattatgctgtctttcatgctaagtccttccaactgtgtagcaggtgttttcatgatctgacagatgaagaaactgaagttcaaggaaccggaactctcttgtctcaaatcattcagccagtaagcggcagagccagagccagggcgtgggccgagcttcgcctgaagcccacattctcattgcctctcctcatccactctgctccgcaagggcaaacacagcagagaggactactcaggagacaggagtcttgcaggctatctccagctccgacaaccgaccaactgggtgaacctggacaagccactcaacctctctgacactgcatctcctcagctgtagaggaaaggtgactgattatcaacacctacgctttgtgcagagctgtagtgagggcaggtcaaaagtgtcttgaggagacactctgcaaaggacaccctttcatacaaatggaactgtcactgtggttcttacgttggtgaaaccaccatgccactctcctacctgaatgtcagccagcagctcctgttttctccgtcggatgttctccagttcttgacgctcctctgctgtcaggtcactgggaactacaaaaatggagggcaatgttacaagaaagcttttatctcgccaaaaatcaaggaagatccagaggccacaaaaggagaaagatatcaagaaagaaactagaagtcagtttcagaaatgactgagtgatagaaatagttatggctccaattcttatcagatttctaagaaaggaaggcccttaaatcacacagaaaagctctgagaaactcttggaaggaaaaacgagagagaagagattactgaaggttaaattaggttggctatgaatgaaaaaggatgaatattagctgagcgcctggccattttcatcccttccagctgggagacttcaggctgacatttaattaatctctctaggcctcagctccctcatggtcaaaaacagagtctccgagatggaaagatgtccatgaccccctgaggtggggaggggaggcaagaggcaaagcaacgtgtacgaacaattttgtgccatctctgggaggggtttggagaaagagactatgtatgcactgagaaataaaaaaagtctagaatatacacctaaaatcagtgcttaactctgggaactgggactatgggactttctctttctgcttcatacctttcttcattgtttcgatgttttacaatgtgctcttatcatcagaagaaagttacttaattcccagatcacagctctcaccacaaaatacttctgccatcctccaatggctcaatctcccccacctataccaacaggagatttggacagacaccctctaaaatgacccttcaagcatgctatgggaagccatgtgggcaaatgagaagaacaagcattagaatcaaacaaaccaggttcaaatcctagctccaatctaccaaatatcaaattaggtcacttcagacaagttatgtaacccacttgggtcacatttcatcatcaatgaagtggtcccaccatcacccacttgataaggctgctgtgaagatgatgtagagtaattaaagtgcctcaaaccctgcctggtgctgagcagaagctcagaagtgttggctcttgttccctccatggcacagcaaagggcacccacactctcaagggtaggggtggtttgagggtccttctatccttcagtgggtgcctatgtgagcctgagctgcactgtacaatatggcggccaggagccccacgtgacattaaccacttgaaatgtcaccacccagtttgagatgtgctgtaggtaaaaaatatacaccgaggccgggcacagtggctcatgcctgtaatcccagcactttgagaggccggggcgggcagatcacgaggtcaggagaccgagaccatcctggctaacatggtgaaaccccgtcactactaaaaatacaaaaaattagctgggcgtggtggcaggtgcctgtagtcccagctactcgggaggctgaggcaggagaatggcgtaaacccgggaggtggaggttgcagtgagccgagatcccgccattgccctccagcctgggagacagtacaagactccatctcaaataaataaataaataaataaataaataaataaataaataatatatatatatacacacacacacacacacacacaccagactttctataaaaacaaaggaaaatgactttttaataatattttatattgattgcacattgatataacttaatgaaatgtattattttaattgatctcaaaggaactagtatgaaataaaagtgcatctatggctcatattatatttctagacagcatagagttggaattaacatctctgcttgagagcacagttaggatacacatactttccttctgcccatggcattaaaacttaatctactacattcacagagcagttactttccccaaatatttcataaaaatcacaagagggtagaaacaatagactacagtgaagtgtacagtgggttaattagctacattagaaaagccgacttttcctttttttttttttttaacctaggttttccccaaccttctctaaaaaagtgttttttaaacatctcaaaatccaaaataagaaaagcattttagtccaggccttgtagctcacgcctgtaatcccagcactttgggaggccaaaccaggcagactgcttgagcccattgggaccagcatggacaacatggtgaaaccctgtctctactaaaaaaaatacaaaaattagctgggcatggtggcacatgcctgtagttccagctactcggggggctgacgtagaaggattgcttgagcctggggtgcagaggttgcagtgagccaagatcgcaccactgcactccagcctgggcaacagagccagacaagaaagaaagaaggaaagaaggaaagaaggaaggaaggaagggaggaaggaagggagggaggaaggaagggaaggaggaaggaagggagggagggagggagggagggaggtaggagagagagaaagagagagagaaagagaaagaaaaagagaaagaaacagaaaaagaaaagaaatgcattttacatcatgacccaatctccaccatacataaaagtatcaaaaataatatctcaccatgtctgttatttcactgtgagctttcttaacagtggtttagtccagtaaactgattttatggctgcatgcggtggctcacacctgtaatctcagcactttgggaggccgaggtgagtagatcacctgaagtcaggagttcaagaccagcctggccaacatggtgaaaccccgtctctactaaaaatacaaaaaaaattagccaggcatggtggcaggtgcctgtaatcccagctactcaggaggctgaggcagaagaatcgcttgaagttgggaggtgaaggttgcagtgggctgagatcgtgccactgcactccagcctaggcaacaagagcacaactctgtctcaaaaataataataataataatataaaaaataaaaaataattatttcataatcaattaggtaatcgtataattacctaatatactgagtcctgtggtttgaaaaacactcttcctttagaggctggaagagacagccactctaaagatcccaacagaccaactaaatccaacccaggtcaccttcacaagagtgggccttaaactgcgtccctgagaactcaagggtgatcactcaggtgtgtgtattggaggacggagccttaaataagttcacctacacacctgctctccagtcccattcctgtgtcaagacccaggactccagctcagcaatccatcagcattatgtggattctaaccctgcacccccgccaaacccaccaccccaaatgtttcttcccaggctgaacagttctcccaacattaaaaaatatatatatatatattaaaatggctgcttcaggaaaaagtcagacaaataagtgagctctggttaaagcaaaagccgttttgaaaaacaacatcaactctactgatgcgtacaccgttctacagaaacgcatgtttaaagcagttcactctgatttttctgtgcttcacagcccagaaaaatttctagtccaagtagaagacccctttaagaaattaatttcttcaggttctagaagatacatattcattccaatataacatggttttgaaattaaggcaacattcattttttaaaaacagctgctccgcaagaggctcaataattgggatttgattttgaagctacagaactggcttaatcagatcatcaatgtatctctacccagcagaagcaagactaaatccaaggtccatataatgaagctgatgaaaaacagagcaatcgtataaaagaaattcctatctcaagactgctatataccctgagaagccaacttgtatcattctaaactggaaactctaaatcgttgctttcttttcagaatctgagcactcaaccattctgggtttaatattcacacatgacaatttttctggatggacacaatctacccagcagaagcaagactaaatccaaggtccatataatgaagctgatgaaaaacagagcaatcgtataaaagaaatccctatctcaagactgctatataccctgagaagccaacttgtatcattctaaactggaaactctaaatcgttgctttcttttcagaatctgagcactcaaccattctgggtttaatattcacacatgacaatttttctggatggacacaatctagcttctgtattataaattcaaaatgcccttctagtcctctatcttccaagatattattttttaaatagtaaaggaataggccaggcgcggtggtccacgcctgtaatcctagcactttgggaggctgagaagggtggatcacgtgaggccaggagttcaagacccgtttgaccaacaaggtgaaaccccgtctctactaaaaatacaaaaattagctgggcgtagcggtgcacacctgtaatcccagctacttgggaggctgagacaagagaatcgcttgaaccccagaggtggaggttgcagtgagccaagatggcaacgttgcactccagcctgggcaacagagcaggcctccatctcaaaaaaatttaaaaatttaaaaaaaatagtaaaggaacaaaaacatccataaacctacaatatcaaagagtacacagagaagggccatcagaagagatttcaacaaatttccagaacagagaaaggaaagaaacagtgctaagtgctaatatcttctagaataaaaactccacaaaggcagggacaccgtatgccttgtacactgttgtgtttgtggtactcagcacagggcctagcacactaaggatttcacacacacacacaaacacacacacatgaacgaagccaactttctcatgagcagacaagtgtggagctggtgtccagggtaaagcctccatatgtagacagcggacacctaagagaaccctaccccaagcaggctctggctcactcgccctgaagccaagcctccctgcccacaaggcccagccatgcacagagcttccgcttaacatgtctactgcttcactcttacacttacagagataaccacacctatgccaggagtgagaaaggacaagacagggaacagaaaactcaccctagagcaaacagagataattagggggaaaaaagaaagaaaaaaaaaacctttaaaagaacagaaaactctggaaaagggacaattacagaaaaagaatacggccttgcaaattaaacatacttttgtcccccacatcaaaaaagtcaacgaaggattaaaagataaagttggggcattcctgtagaacaaagaggtttgaaaatataagcaaacctggaaatataagcaaaaaaataaactcggttgaataaaaatatttttaaatcccacagagaaattctcataggaaaaattcagaagttccaggaataaagacgatcctaaaacctccacagaggttaaggagagtgattaatcagaccacccacgagggaagatctcgctggtgtcagtataagagcccgcacactaaagatagcgcagtggaactttcaaaattctaaatgaaaattatctgaaccccaaattctcagtcaagtaggagggtaaaacagactcatttcagatacataaggatcagaaagtttgtcttctgtgcaccccttctgaagaagctacttcaggagcaagatgtggatcaaggaacgggactgactcaggagcctgaggacagcaagcgccatcaactgtgatggccaacagccaccagaccgggtcagagcaggaagccaaagggctgccagaggaatgccatcagaaagaatgaaatcagactcgaaaccagagaatgaaggagaaagcagctgagaaaactgtgtgataccaacaggcatcattcggtttcctctcaagagaataaaaaggactgggcaacaggaaaaactcaactacaggaaatcacagaagaaatgaaacatgccccccgagtggtgtcctctgggccatcagggacgccaggaacagctccctttgagtgggcacctggctctacggtgagtggtatctacattcctgtcatggtgctggtcgctggtagttaacttacagaatcaccctgtagacaaagcatgaaagaccaacccaggctggagaagcaaagctatctgttaccaaggtgaaggaagagctgaccaaagtttgagggaagcaaagtggagagggcagcagggtcccaaatggtccccacagcttcctcctacaacactagagaccagaggcatggataaggatcatgaacaagaaacccacgctgtaaatatgccaaaggtaaaaatccaggaactgaaaattgtgatcaactaccaaaaatggacagtgagagaaggaaggaagagaatggtgtgagctgcatcctcatccatcataggcagaaggcaggagataacctttgatcttgacaaaataatcaccaatttaagaacttggcagcacccactagaagacctaaaagcagaaaaaagtgaattaatagtggctgctttggggagtgggtctgggaatagagagacaggacatataagcccctgaatacttgctttaaaatacatatatatatgtactatgacaatttgaaaacaaaagactaaaaatgtacaactatggtcactagaaaagatagcccttctgtgtccttggagtcagacagaaaacgcttctggccaatttgtagctagaataaataagacatttatctacatttattttgatccaatctcctgacatttgccacatgactgctaaattacttctccattccatacttactaactttaaatcataatgctgctccccttctggctcaaccaatcattcaagaactttattttaaaaagctgaactacacctcatttttctagtggaattttattctgagatgaggcaaaatctaatattttaataagtattttcctctgcataaacttaacaatgcaacatcaaatctttaattcaagccttcattctcatgctgccccggacagaaaaaacatccaaaaacaaaatgcttaatttcatttagcagcatgaagaatcaacactattgctggagagctgaggtgtgattgattcctacagtcttggctagtgtcttcaggacactgcgaaggccacagctggaacaagaaaggtggtggtcagaaatacccatgtctacctcacagcccgggagtttctgggaaagcaccgtccgcaccctgggaaacccgtctattcatgccgcttctctcctgtgtagccattagggttaaactgcaaaagaacggctcagatgggccagatggcagcacaacaaacagctcctccctcccccactgccacgtgctgcagccatgcttatgtgccagggaggcggtgtgccagggaggcggctgaaccccttgctctttaaaagaatggccactggggagggcagcaggttgtccctgccggcagcctgagcacaatggagacaaaccagagggggagccgccctgacacaccacccggtcgctcgccctcctcgcccattgccagaggggcacccggaatccatgcccacaaaggttaatctgcaaggtgtccggctggcagtcagggggacggtccagcatcagccccatcaccattcctttccagggttccaatttaatgaagaggattaaagtgacaaaaacaacaaggcgctattgtgcttggctgtgaataggaaagccacacaagggaagctttcatttatttatttatttaaatgttgctttgcagattttaacagtcggcagaaacccagagctgaaatgggttccagccagtggcatacaaaggaggactgtcttaaagggacagagccctctttccaagccagaggacgatacatgagcacacggcgggctctagtctaaaatcctgcaacccgcgctccaccggccacaggcagatgcccggggatatgccataaagttccacggaaaacgcagctctctgacagcaggttctgcttggcagacacatagcagctgccaggaccacactgtcctaaatccccgtgggtaccgtcaaatgaacgtgtccaaggcatgctttaggaccaggatgtctctttgaggtcatccagctggcaccagacccctctgcctagctttcaaatacatcacttgccttatttttttccactataatgattaaccagcatccttcttacagcctctgcctttcaatggataaaaaggtccatatttaaaccaacaatgcggggaaacattttataaagtaattaaggagtgagccctcatttgcggagaaggtaaatatacaaaaggtaactaccttagtcagagttgctcccaggccaaggaggtcattgccatttccttttcatcccctccagctggcctgctgccaacgggtgccctcctgctaatcacggccacacccctttacagacctggaagtttcataaacactgaatacacacacacacacacacacacacacacacacacacacacacacacacacgctccttctctcttaaccttaagctctgcctaaaacagcagtggcagtaatgaaataaagcacccagcttttctacagcctctacagaaactaccacctgctcagaggagaacaactggctatttacaaaccaggctttgggctcaaaagcgcgcatctgggaaaccatcttgttcctccaacctccaaagatacagtgatcatggcgtgagggctaagaaactccaaatatcctgagcactggttccagtattcagcacttactcgccacatacctgtgtcaatcctactagtcagaccttaaacaaaccagcgtgttcacctccctctgcactaccctatgggtgtaagtcactttgtctcccagaaaatcccagtgacttataatttgaaaaacttcaaaatactggaaacaactcaggctttggagacataccaatgttcaacaaactgctaatctctctgggcctcagttttgtccagctgtaaaatggcactgcagttattagcactgttgtgaggaatgcgtgatggaaaagataaagctgtgagcacaaataggtgcccaacaaatgccaaatgtctttcctttatctgcatacccaattcatcttcctcttttgcttctttctaacaatgtcatcattgacgcattcagcctgcatttactgcttgcctactaggtggaaggcagcgggggtacaacactgaagagacagatctggttccttccggcaggagcagcagtccctggaagcatccactgagaaggtgatgacttcaggtgtgcatgttaacgagggatcatgcacaaggctgtatgaatccacagcatgggtgcctcacccaacttctgggacggatccggggactgccactctacagggagtggtcttgggtcctaagcctagcttggggccacactcaccagctggatgaccctgggcaagttacttcggctatctgtgcctcaaagcaaacagtaagctaagaggttgcttcctgagcagagtactgtttaaaatgactacagcttttatatcacttggggaacatacaaatgacccacaataatacaaaatctggtaagttaaaaactataggataagaaggcagtgctgtgaggcatggctaacaactgcaggtaaggcagcaaacaagaaaaaaaaacagtcgaggagtcaaagataaagttcttacagatcattactgcaagtggagaatggcttggtttaggggaacttttttcccctcactgagaaaagtaattttcaactttcacaaaactccatgctgacattacaaatatgtggggtcagatctttaaggcagggataagaatgcaaccaaaatccagtgtatctttcaggtaaaatgtaacggaagagagatgtaaagcaaacagttgtaatgataccaggattttactggaagcctgaaattttgagacagtcctcaggataaatgttaggatcagaggatgaagaaagatggatgtagcaaaggggtgtgactagagcaggaggcccaggtgacactttctgccaataatacactgaagagttcacaccttcacacagtctatctactttgggaaaccaattaagtttcccactcactgagtcagaaacacagtaatacttttcaaacttagtaccttaaaaaggaaggaaattctgatgtatgctacaacacggatgaacctggaggacattaagccagttgcaaaagggcaaatactgaaggattccactgataagaggcccctggagtagtcaaactaccatagagacagacagtgggatggatgttgccaggggctggggagagggggagtgggagaatgaaggtttaatggcgggtttcagttttgcaagatgaaaaagttctagagactggattgcacaataatatgaacgtatgaatgtactactgaacttaacaggctgaagatggtacattttttgttatatgtattttaccaccattaaaaataaaggcctggcatggtggctcatgcctataatacccccggcactttgatttgtttttttatttgtttgtttttgagatggagtcttgctctgtcacccaggctggagtgcactgccgcaacctcagctcactgcaacctctgcctcctgggttcatgcaattctcctgcctcagcctccccaatagataggactacaggtgcctgccaccacgcccagctaatttttgtatttttagtagagacggggtttcaccatgttggccaggctggtctcaaactcctgacctcaggtgatcagcctgcttcagcctcccaaagtgctggaattacaggcgtgagccatcgcacccagccatccccagcactttgagaggctgagggagggagatggcttgagctcaggagtttgagaccagcctgggtgacatggcaaaacctcatctctacaaaaaatacaaaagttagccacatgtggtggcacgcacttgtagtcccagctacttaggaggctgaggtgcgaggaccgcgtaagccctggaatgtggaggttgcagtgagcccaggttgcaccactgcatccagcctgggcgacagagaaagaccctctctcaaaaaaataaaaatataaaataaacaaaaatttcacagcatattctaacttctctgtctgcttaccttagttcctttcccaagaaactatgatttgacttttgcgtagtgcattttaaaataagtatctcaccaccaatttgcagcctaagagatttgttaaaagaatttacaactgggtgtggtggctcacgccttgtaatcccagcactttggggggccgaggcaggtggatcacctgaggtcaggtgttcaagaccagcctggccaacgtggtgaaaccctgtctctactaaaaatacaaaaattagccaggcgtggtggcatgcagctgtagtcccagctacttgggaggctggggcaagaaaatcgcttgaatttgggagacagaggttgcagtgagccgagatcgggccattgcactccagctcgggcgacagagcaagactccgtctcaaaaaataaaaataaaaaaatttacacacactacccaggaccaaaaagagttaaattagcaggcagctagcagaaatggtattcaacatagaggcagaggtgccttccggcaaattgccaatatgaatatttagactattctaatttaaatttcttccatgcaaaaactacccagtttccccactaacagtaaatctattaaaggcttttattactgcattctgcattttcagggaagacttcggtcctcttctcagtgttggagccgtctcatctgacagctcctcacgttcacaggcgatgctgcctgggctttcactcactactttgtgacctggagcaaacaatcacctcttccagcctcagtttcctcacttatgtaatgaggatgtcacccagcccttctcaactatcttataaaaggaaggtattggctgggcgcagtggctcacgcctgtaatcccagcactttggaaggccgaggctcgtggatcacttgaggtaaggagttcgagaccagcctgaccaacacggtgaaaaaccccatctctaccaaaaatatacaaaattagccaggcatgatagcaggtatctgtaatcccagctacttgggaggctgaggcaggagaatcgcttgaacctgggaggcggagggtgcagcgagccgagatcgcgccattgcactccagcctgggcaacaagagcaaaactccatctcacaaaacaaaaaagtaaggtatcaaaaaatttaatttaataaatcctagaactcaaagacttagcttgcatttcaaggtagtaacagaacctaagtgacaaaattttatcctgcgaatttggtttagaaaaataaagttaacatccgctttcaataaaagctaaaaactagaaaacaaccattttaagaaccttaactttttctaaaagctcacagtgacaacacctgatatagctgacatagctggggtttcccagcagcttctttctagcactccactgctgtttcgaaaggatcccagggactgggcgcagagctccacagggaagaaccattttctagccctagcctccttgagccaagtggcctgctccttcactcccagggaaagcctggagttccctcttcctccaaacaagccaaaacagcttgctcgcccctcctcccaagggggcaggctcctgtcccctgggtgaagctgccactccccgtgcctgccagctgcaaccactgtcagcttgcacagctgggccacgacaccccttccgtgtccaaaagagaggcttggtggcttggaagtcaattctctctcactttaccctcagtggctcagatctgtttgtttgctagccctttgtaatgctctgaatttttctgtacattgaaatattctccctcagtctgacagctggaaaggacccctagcattaaacgcgacgtacaattccaactccttttctatgtgtattgatggaaagaggactactcgtgcccaggaaaggttcccaagtccttaccgagtaaaacagaaactccacgggtggcaggcctagaggggagatcaccctgaatctgtcccgctgttttctgcccccctatttcaaacctcacggaagctggaccaaggaaattgactactggcatgttcctaagtctcaggcttagaagaaacgacactgaatgcctggatacctatccaaaagtgtagtggaaaaaccttcagaggagagcatagaatgcagacccaaaggacagacatgcagagagacagccacgcacacatcagctcctactgctggctgctgggtgggagaggcaggcaggcagcaacgcataatgggaaatctgctgacagggctccacacgccatccaccagcctcttacccacggtgagtcccctctcctgcggccccagtgtcctggccagccctgggcagcaacatcaaagcctcggcaggtcacagctctccacgtcagaggccatggtggctccgtgcagcgaccccacagtaccaggctgccgggagctcccacagctgtaggtgcagggagagccggagcaaggacagcatgtgtgcgccagcacagcaggggtagagaagaaggtgtccagagaaaacaaaagctgagagcaccggccctgcaggtggaaactcgctgggcccggtggggaaggctggcgcagagcgcagagatggacgcgcagagctgcagccctagcagacgctccgagtgtgtgctgctccgctcctccaggctcatttccatgaatgcagtcacagccagcccctcctactatcccccattcccggcctcccgggggggaggggaggcaccaccagcatttgcgcacaggctgcacttgctttcctctctccctcagaagcaaaagcctaatgcctgctttcactgcaagaatgccaaccttactccagatgccctctcctttctgcatggataaacaagagactggatctagggggtggatgttctgtcaccccaaaggcacaagcctagtcctttccactgccccgcatcaggtcagcaggcaaagtggcactgaccagactgctccaacaccgtcctggaggggcttcaggaggagtatcctttgctcccttcctccagggatcccatgccctccacttccacgagggacactccagccttttcaccaagaaggactcgcctcctactcagtacactcgcagccaccaatggttatttcttcaccagaggctgtggcatcgcctttgaggacacctgcctattatcaggttggaatgttaggcaagcgaaccttggggatgataatacaagatggctggtgacaagaaatatggctacagcctgaggatagcagctctcaaacctcagagggcacgagaatcaccaagggcgcctgttaaacacgcagatttgggaccccagtcccaaaagcatgaactccagagacccaggcccctaagtgacacagaatacagggttactgcagaccacacacagcttttgactaagaagggaggagatattttttaaacaattctaaaataaccaaggagagaaagtaaaagggaaatcaccgtgctagagcagggttcttcagtctgggcattactggcacagggagcaggtcactctttgtggtgggggcttccctgtgccttgcagggtgcttagctgcgtccctggcctctacccactaggtgccagcagcatccccatcccaattccccacaaccaggtttgacaaccaaaaatgtctccaggcattgctgaatgtcccctgcgggacaaaactgtcctggttaagaaccattgctctagataaacaatggaagagggggtggaaatcctaaaaacactcccataccctccctcctttccagtctcctgccgttaggaaatcagtcatggaaggcacccgcccctctgcaagccctgcctccactgccatgccatgggggttgggctggctggggaatgcaaacagacgtcctcatcaccaggcagtgccaccaggcctgacccaaataccctggctctgcgttgtatcttgtctttcaagaaacagccatagtgtgaacaattttcttttagtgtcaagagagtagtacttatttaaaagaatcatactaagtccatgaaaaacaaattctaaaattctacattctacaaaatgtatattgagagtcccagtgcaacacgtccctgggcccctgtcttcctccttctcactgtctagtaagccatcccacctctcctcccagtccaaggaagattccactttcccgggatccaccagagtactcagttacatctctttgcttctttcttcttgttcagaagctcatcctcaccatccgccatccgtcgagtcttacctcctacagggagaactcagattcctccagccatgctccctgctcagtttacccatattaaccatcacctgatgaccttctttatcacttggtaaataaccaggtgataaattacgtgatacaaacaaactcagtgaagacagcctggactatccacgctggttatctaccaccatgtttcccagggatttcatgtgagattaagctcttgcttttcagtaatatcttgtactgtaaatattctcatagcacttttcatagtcctaagggctgtcttattttgaggtgacatcactggtttttacacaaatacacatatacacatacacactctcttcagggattgaaagagcccagcaggtgagttctgacccgtgactctctacagaagactcagtcatcatgtgcaaggctcactatgactctctctttaacatggccagcttccactacgccgacagagtggatcacagccggggtttacctgtggtgtgtgaacctaggcaaaggctttagcttgacccaggccagagactgcaggtggcaaaaacctgcactttcagttaattctaggcacagacaacatgagaaaaggatgtcagtggacaaagaagttacaagaaaagctgcaaccaagaagtctacagtgtggccctcctcatatctgaacaaaacagatgccacaatatataccacacaatcaagcttatgaaaccacatccatcagagagaatcacaggaaacgactggccacagaataggaatctcaggaccaacagaaaacatgaacgttttaaaaaataatttctcagactcataattcaacagtctttttttttttttttttttgagacggtgtcttgctctgtcacccaggctggagtgcagtggcgcgatctcggctcactgcaagctctgtctcccaggttcacgccattctcctgcctcagccaccctagcagctgggactacaggcacccgctaccacgcctggctaatttttttgtatttttagtagagacaggttttcaccattagccaggatggtctcgatctcctgaccttgtgatctgcccgcctcagcctcccaaagtgctaggattacaggcgtgagccaccgcgcccggcctcaacaatcttttaaaaagttcactgcatggaaacgaggccccctgtcagttactgtggaagaggccccctgtcagttactgtggaagacacaatgctgaaaagacatggtttcggccctccaagagctcatgtgttactattccttttaaagaaaaaagaaacaggcagcccgtaaatgccaaataaatgctgtctgcaaggtgctatgcggagtggggctcagagaagagcagggcccaggttagtccaagacggttccacgcgagagcctgggagagggcagtccaggcagaggtggaaagggcaacacaagggacagagtctggaagagcaagctccaggcagactgtggtgcctttgaatttgacaccgagacaggtggattctattctgctgttgagttgggcgagagataaagaagctcttctggaagagcaagaagcggcagccaggcgccatgagaaagaaaagggactggaagctttgcgtagtcttcactgcaccgcggtctgcactcctgttcagaagcggtagcaaagaaataagtggttttttgccctactccaactcacaccttcaactaccatccttatccagcactaattccccaaaccactactgacttcccatcctctttccagttctctctctcaggctcaaggacaggtgcaaccagaaagtgaccctctgacaagcgtgcaagggcaatgtgcatcaatcattttatttctaaagcggaaaatgaggcacaaggaatacattcaaatctcgcagtttcatcagcatcccaaacccacgaattcacaatgctgctcaaaggtcctctctgcccatgaggcgtccccaaaccccaaatcacctgggccacaggctccaagcaccacagacatgataagcataaagcttttaggcgagtcagcattctcaatctcccctccttctgtgtcccatgaaaacagaggcctggggttttttttacttttttctttaaattctattccactccttacacttaaaaatgcctcattattctttagtaaatgctaggagcataaaatcttcttcaaagaagcaaaaactggcatctgttcctgctctgagaagtccttgaagatctcttgaaaggaaggtcatttctacctgcacctcaaaatagaaacaaactggctccctgttccagacatcacccttaccagagttgccccgagtccgggtttgcaaaagtttgggagaggtgtaagaaggagctgactagggcaccagccttccaagtcgcgggaaggtccaggatactggccccctgcctccacctaccagcagggcaaggctggagcaggcacggccgacccaagcctcctggcgagtgcatccttctggtgccaactcagtgtgttaggagggcaggcttcttcttctctgtcttggctgctctcatgaggctgctcttggaccgtcccctatctcctgcccatgcagggggcagaactgtaggaggaagaaagacgagacctatggcaggggcagccaaggagagcagtgaggaggagcagaaggcaggccaagctctgcacctttgagatccagggcagcacacccactccagaactagctgaagaggtgctgacccatgagagggcagtgagtccctgatatcatgcaggtgtcctatggcctccctccacgacaaatggatgcccacctctaggtggcacgatatagtcagtttctctggacaaactctattctaccccaaacactggtaaatcctccccaagccaggctggttcctgcagcagggccagcctctcatctagacaggaaaaagaaacatggaaaacaaaggggacctgagcaaaggtagaaagaccccagtaatcaaagttctcgtacatacaccacgatgtttaaaaacattatttacgccgggtgcagtggctcactcctgtaattccagcacttttgggggccgaggtgggtggatcacttgaggtcaggagtttgagaccagcctgaccaacatggtgaaaccccatctctactaaaaatacaaaattagccaggtgtggtggcacatgcctgtaatccctgctacttgggaggctggtattacaagagaatcacttgaaccagggaggcagaggttgcagtgagccaagaccacgccattgcactccagcctgggtaatgagagcgaaactccatctcaaaaaaaaaaaaattatttacattaccaacatgatgtttacagaaatataataaaaaggatattaaacttcacatgggaaaaaatatatatgacaatagtcagaaaaatatgaaagggagaaagggtaacgtgagggtgtagctacctgagattaaagcacgtgaggctttggtaattgaaactgcaacggaagaaaaagaccagaaaacaaactcaagaaatactgaaacacacacgtagcactttgaatcggtaaagaaaaataggattattcagtcaagggtgctgagcaaataaatagccagctagccatttgggataaaactaagctgaaatgaattctagcttaatcaaagatgttaatgtaaaataaaacctgaataattctagaatagagcatgaattagtatagtcataatattggtgagtctgctcatttgcgacatgaaaatgaaaagcttctgagtgaaaaataatatcccataagctaaaaggtaaacaactaggacaataaattcacaaaacatatgacaaagggttaatatctttttttaaattaattaacttattatttttagagagagggtctcactctgtacccaggctggagtgcagtggtgtgatcatagctcactgcagcctcaaactcctggcctcaagcgatactcccacctcagcctccagaatagctgggactataagtatgtgccacacctggctagggttaatttatttaagtcacaaagaaagcagcataaaaattagtaaagcaaagatgaatacaatgagcaaaggatataaaagacagattacaaaaagagaaatacaaatggtcacacagaagaagatgctcacagtcactatgtgtttaatgcaaattaaaacatgaataacataccattttccattagtctggcaggaatcagaatgccagatgagacgaaatactgtcaggggagtgggctacacaggcagtctcccgtgctgctgggagagtgtaaactggtacaaccttttggcactagcaaaacataaagagcacacaccttttgatttgatttgaatcaaacttatgaatttgattcttaaattccacttaagagtggatatgctccccaaattccaaaaattttaaactacctaaaaactacttggtaatttaaaagaatgaggtgatttgtaaatgctaacatgaaaagatctctaagacacatctggtgaaacaggatggcacagaataccttctcacaagtaacacctacgcttgctaaacacacagggagcttctgagaaggacacacttgaaactgctagcaggaatcacctttcaaagcaaggactgtggaaagagagtgggggaggcctggactcttcctcttctgcctatctgtatatctggatccacaactaacacaaaatttgatgttgaagtttttattcaaagaaaatacagaaatgcccccagccacttatatttgctcagactggcccaatatttctattatagaagaaacatccttggattctgttttaatgcccatgaagtgcctgttgtaactacacccattctgctgtgatttcgtatgtggtctctcgtctgaattctgtgactcagaatcccaattcttcacagaaaacacaaagggaaagagactttagacaccagaaggaaaggcgtcaatagtcactgactaggccgggcgcggtgtctcacgcctttaatcccagcactttgggaggctgagatgggcggatcacgaggtcaggagatcaacaccatcctggctaacacggtgaaaccccatctctactaaaaatacaaaaaaaaaaaaaaaaaaaattagccgggcatggtggcgggtgcctgtagtcccagctattctggaagctgaggcaggagaatggtgtgaactcgggaggcagagcttgcagtgagccgagatcacgccactgcactccagcctgggcgacagcgagactccgtctcaaaaaaaaaacaacagtcactgactcaaaaaaagaaattcactgcatctttttttaggtcagaaattgagcttccatgattcctctgtagaggaaggaagaacatgatacaagttacgaaattattattattatttttttgtttttgagatggagtctcgctctgtcgcccaggctggagtgcagtggtgcaatctcagctcactgcaagctccgcctcctgggttcacgccgttctcctgcctcagccacccgagtggctgggactacaggcgcccgccaccacgcccggctaattttttgtatttttagtagagatggggtttcaccgtgttagccaggaaggtctcgatctcctgaccttgtgatctgcctgcctcggcctcccaaagtgctgggattacaggtgtgagccaccgcgctcggcacgaaattatcttcttaaggaagaagtgaatgtgctagggaaagtcctcacacaccagctgatctacaggaaagcagaatttgacttttctgtctccatttttcccctagtgtattacctagggctacagaatcaacgcatcacatagtcaggagaaaaacaaaaaggtaacttggaatatatgaaggcaggagatcagcataactcaacagtggctgttgaaacttaaaatcctggctgatttggactcagttttcagagtccttcccaggagccacagcaatggctttcatttgcagaactgaccagggctagactagataacttctaaggcacctcatggctttaagagtctgtgattacactactgttagtgactctgtcccaggtaattacttaatggctccagccgtaacacaaaacccatatgaattccccacaagttaaagttcttctgaaggtaaacaggagaagatggtggcagttttaagagtccttttctaaaaaggaaatctcgtcgggcgcggtggttcacgcctgtaatcccagcactttgggaggccgaggtgggcagatcacgaggtcaggagatcgagaccatcctagctaacacggtgaaaccccgtctctactaaaaatacaaaaaatagccgggagtggtggcgggcgcctgtagtcccagctacttgggaggctgaggcaggagaatggcgtgaacccgggaggcgaagcttgcagtgagctgagatagtgccactgcactccagcctgggcgacagcgagactccgtctcaaaaaaaaaaaaaaaacaaaaaaaaacaaataaaaaggaaatctcagctaggctgaaaacagaaagaaaggcagagacaagaacactataaatccagtaaagttgcctttgcaggattatcaaaatccaagggaaaaatgagagatggatactactaaaaatttccaggaggtctagcccagcatctctgatttaaccagcagtaaactgcatgcaggttctgtcagcctgcagccacacacaggttcctgcgaaccctcctgaagcacagggaggggtggatgaaaacgggaatctctgctgtttcctagggccactcctgctccaactctacctcctatctgcatctacagtccctgactttgtcctcccttcggctgaccacgctgcaggctgataaaggctcttaatgcccagacctgtgcctaccaagacctaagatacctgccttttctctccaccgatactgacatcttagaaaattccacctgttgccttccacatccctcctgtctaatcagactttgggtcttgatcccccacagccagtcctgtgctttcatattccataatgaagagaaaacttgggaggctacacaaagactcagataatggataagggtcagctttcttcagaggggcagaatccaagcccttgtttctattcaccttcattaagaagaaagggcagttctaatcctctgtgtaataccgtgagcattcatctctggtgtactcaacaggaaagcctataaaattcaaaccagagtgaatcctcttcaaaacttgtcacagcagatggtgatacaggtttcttgctatgatgtgtgctttgtacaatgccaaacatgctcctgcttaaaaataaagatgtaaccatttctgattctgcaaaatacaaaatccataaggaagggagtgagaaatatctagggggatatgaattgatagttacagcacctcaggtcttcctgcaaacaccacaacctgagcaacttgtccaactagagactaccacaatcacatggcacgcattaaaacatgggataaccaccgggcgcggtggctcccgcctgtaatcccagcactgtgggaggccaagacaggtagatcacgaggtcaagagatagaggccatcctggccaacatggtgaaaccctgtctctactaaaaatacaaaaattagccgggcgtggtggtacgttcctgtagtcccagctactcgggagcctgaggcaggagaatcacttgaacccgggaggcagaagttgcagtgagccaagatcacgcccagcctggcaacagagtgagactccatctcaaaaaaaaaaaaaaaaaaaaaaaaaaaaaaggataacatggaaagttcacgtcaaggacagcattttagaagcaatctgaaaatccagtgtcccactgaggaagcctatacttcattctatttggcatattttcctacaaataatactagtttatacacacatgctatcttacagcttaaaatgttttctcatttccacttttttaaattttccaacaaagctcaactgtaactctgcatatttcctgacaatgaactatacactgttctcatcagtttacaggtaagataaagactcaatgagtacaaataatctacctcgggtacactaccaatagagcccaattcacattccggtcaccggctgcatcctcagctcttttttttttctcttactgaaatacacagattcacttcagctcagcgtttactgagcatctgccataggcgcagcctgtgcttggagctgggatttaaacagctccagtccctggcctgcacagaaagtgaaggccagtggggacaggcatgtaagcccgtagcagcagcacacccggccacagcggccaagtgcagcaagtactcacagaattccaggcgatgccaagaggcttcagaggggccaacctgtgagccagaacttgaaggaccaacggattccccagatggacaagaacagaatggtgtataccaagcaagataaagtgtatggaagtgacagaggccagcaacaatgggcacaccacagggcaaggcccaggacacagcagggctgaactggcaccctgaagggggcttagtgtctgcctgtgaagggcctcaggtcccacaccaaagattttggaatctatcccaaagagatgccaaagagagagttcaaaggcaaatcaaggccgggcacagtggttcacgcctgtaatcccagcactttgggaggccaaggtgggtggatcacatgaggtcaggagttcaacacaagcctggccaacatggtgaaacctcgtctctgcaaaaaatacaaaaattagccgggtgtggtggcatgcacctgcagtcccagctactcaggaggctgaggcaggagaatcgcttgaacccaggaggcagaggttgcagtgagccaagattgcactccagcctcggcaacagagcgagactctgtctcaaaaaaaaaaaggcaaatcaagggggactgacattaacaagattaaatagctaaaaataataataacttatggcagttaagaaaatagtgcccaattaattaaactggttaattctcactaacacacatatacagaatgaaaactgacgaatgtatgtaccaatgtaccaatgtaccaggtaaaaaaaagctttttttttttttttttttttttttagagacaaagtctcactctgtcacccaggctggagtgcagtggtacgatttcggctcaacgcaacctcagcctcctgggttcaagctattctcctgcctcagcctccaagtagctgggattacgggctcctgccaccacacccggctaatttttgtatttttagtagagacagggtttcaccatgttggctaggttggtctggaactcctgacctcaggtgatccgcctgcctgggcctcccaaagtgctgggattatcagtgtgagccatcgcgcccagccagaaagcaatatttttaacctaaaaattgtgggtttgagattaatgcagcagaagagtctgacttccttaaagaatattttcaaaaacccccacataccctttcttaggcgtgttctttagggcgtaagtctagttaaaagcagctctatggaaagcataactgactcttaacttctgccctcccctgggatctcagggacctgccagaggaaactccatttgtccccctccttttacacctacctaaatgccactctgtctctcacggcaatgtctaagggcatctattttagcagtggtttaaagggcaacactgccttcagtcccaggtgacaacacaaggaaataccatgggagggggtaagggaagcgaagaagcaccagttctttaaggttacttggtcaaagcaaagctgttcagtaattctacctctaagctcccggcccctaacctcatgccccacccccatcactcccactgttgattagggtagttcatgttgacttttgaagcctccaggataaaaagtgactattacacagcacctccggtgggtctgaagctaggctcacccggaaggaccagaagcaagtaagcgtgagggaccatggccaggcccggctcactcctgctgtcccagcatagtcactagtgtcctcttccactctcaaaagtgttccctttggaactagatcttggctagtgtggactcacctttcagttagaaaagcaccaagcaggcagttcagccctggcctggcacgtcccctcactactgacccctcttcagatacagaagtatcgttatggacacctgtgcatgcttccctcccagcgtcccccacgcgtgctgcagctttcagtgtcgcccgtggacactgtccaggatcatttgcacttagaggtggggctttcaaatgtgctttatagtgaaccagagtgggaaaagcctaaagaggacacccaagttttattacaactttcacaaaatccacttgaaacatagccagatatttattccaaacttaaaaatatcacacattaccagctacaacccagtacgcattttactattttgtcttgcagcattacaacaccaccatctgataaggtgccacaataaaatacaataaaacacacacacatccacaaacacaactcctgtgttgacccagggctttaagacacagctcttcagcagaatctcttgggatttagaaggcacagcttgtcatcccattactcatagctccactgtttacagtacaggtgtggagcagataaaggaagttctacagaccctgccctcccaggcttcaaacagtcctcacctaacaaccaaagggagaagaccacatcgtcttttcccttagacacattttatttaacaaaacaagtactatttatcccaaatctcactggttctttcaatccgatctctaatgtctttactttttagtatcagattctttctggatatttgtggaattcccagaagttctgaccaactgttattttgatacaggaagtagacacaatcaccaagtatgaagtggaatctaccaagaaacacccaaggcggaactctaacgaaagcaaagattggaggagaacttctttggtttaaaaacactgagttaccttaatatctctctctcttctcgctctttctctctctctcctctctctcactctctgacacacacacacatacacacacacacacccgagagagcctcagcttcctaaccactaagagactatgcagtctttctcctgaaaacagtaagataaaaaccagagtctaggttggtccttaactcctccccaaaaggctcagtaaactatcctcacaggatttcacatactaatgaaaagagatacctaaaactccactccatataccccaagccgcatcagtcccggccgggggctgcggctttgactcaccgtcctcctcttcggttttaaggaccatcttgtttccttacagcgggacacgaaaagtccgttctgtgcttccaggagagcggtaacttactgggagccaagttttcctgtggggtctgactgggaggggccggggatacctgtgaagctgtccagccactagggcagctcagagctgcttcctgaacagacaggcaatggctggctgcacgcctgggccaatcaacctccagcctccaaagaagcggcactcccagtcagtgccaccacccagttcctgaagtcgagctcaagcaccttccgagtgtgttaaccatctgcttccctgaaagcaatcttacactggagtcaaactagtttagtagccacacttctagtcttttctcaaactcaaccaaagtcatagccaggactcactgctgtttttctcttcactttcaagtacagttgtcccttggtatccaagggggactggtgccaggaactccgatggacaccaaaacccacggatgcttgagtccttaattatttgcacataagctacacaaatccactcatatactttaaatcatctctagattacttctaataccaaatacaatgtaactgctatgtaaacagctgttatgctatattgtttaaagaaaatgaaaagaaaaaagtctgtatgtattcagtacaggtgtgacctttttttattttccaaatattttccatccacaataggttaaatccatggatggggagcccatggaaagccgactacattttcttaaaatggaatcattaaaatccctggtcccctcacaatgagataatagcccatttcccaagagcatgactaagagatcgtaatcattacagcatgttatgaggtcacaggctaaaagcagaaagcagatattagaggcaaaaaaaaaaaaaaaatccaagggccaaactcccaatctaagttcagtttcatctccattatgatttctaatatgctgcacccaaagattcttgcctgcacagtcctatcatgttcatgacacatattcattgttgaagattagaaaatagtaacaaggaaaaaaaacaccttaatcctatcaccaagagatagccattggtgacattttggtagacattttccagacttttgttataagtattatatatattctctctctcttctatagatacacacacacacacacacacacacacgatattttatatgtcgttttatagctacttatttttacttataacattttttcatgactgtaaatggacatctatcacatttattattcttctcagtctagacataatatttaaccagtcccatattgtaagacttctaagtgatttccaattcttctacgtatctcaatacacgtgtgcacacgtttcggcacatctctttaattatctccatagaaaaaaattctcacaagtagaactgctggatccagacatagcttcccacctcatcatcgtaatagataacatttattgcatgcttactctgtgcctagcttgatgtgacctaactcatctaatcctgaaaacatcccatggggtgagtgtcctcgccatccccagatcacagatgaggatgctagcacccagagacgttgcatggcttgccaaagcacgagacctggctgcagagcccatcctccgcaccctgctctctgctggactcccaaacccctctcctattagtcttcattgtaaatgcaaacacctgcagcagctttgcaggaagtgctagactttggccaagtctcactggggagctgggaacacacacatctacagcaagacaacggggcgctgtctccagtcagactctgaaggtgctgacatgactccagggcaaagacttcatcacattctcttctttcttgcctaataacagttgaataaatacatatgcatatatttaaaaaaaaaaaacactttgttttgtagaggcaattaatataaacccaacgtgtcaccttttggtttagtatgtcaaaatcacagttgtaagtcccagcctgcaccatttcaaaacctatgtttaatgattcccaaacagcatttctatcttctggtatcaggtctgattcacagccagtgatcccaacttgtaagagggcaggtcacttctattttctccctactgtcaaatggtatagcgtttctctggaatagacacccaaaggcagaaaagctggtcatgaggcctgagtacttaaagctttcacagatgctgccaaagtgcttgccacgtccctgatgggaccaaacttaacttctgccagtcagacagtgggaaacggtttctcgttgttgttggtcatttgcactgacctgattactgatgatgctgattatcttttcgtaagtttgaggtatttcctctttcatgaattgctttttcaaagcctttgcccacctttctattgcttatcattttttaaatgatttgtagattacaaatcctttgtatgaaatgttacaaatattttgtcataaccagtcacttgtttttaaaaagtttttacaaagatagttgtatcttttgtcttatctgtttcgttcaacattcactgagcacattaagtgccagccactagtgagacatcagaggactaaagagacaaaatgcctgccctcgtggcgtctccactctaacgagatgggaaaggtggggaaacaagtaagtaaaatatgcagtatgtcagaaaataagtactgtggagtgggggaagtggaagtgcagtcagggaaggcctctgctgagaagggccaggaggctactgtggctggagcaggaagaacagtgtagggaggagtggaagatatggtcgcagaggtgaggagggtggtaggcgaactgcatggggccttggcagctattttaaggactctggtttccattctgggtgagatgcatagctgctgccagggttctgagcaacagagcattttgtggcttcctttgtaacaagaccactctggctgtggggaagaacagactggagacagccagcacaggagctggagaccagttggggggctgctatagtcatccaggtgagacgggttggcggcttacttgataaaagtggccatattcttgctatatttactttcagggtacagccaaggatgtcccaatggagtccacgtgaggtgtaaaagagagaagtcaagggtgactccgagctttctggcctggcaagtgaaagaatggagctgctatcttttcttttttttttctgagactgagtctcgctctgttgcccaggctgaagcgcagtggcgcgatctcggctcactgcaacctctgcctactgggttcaagcaattctcctgcctcagcctcccgagtggctgggattacaggtgcctgccaccatgctgagctaatttttgtatttttagtagaggcggggtttcaccatgttggccaggctggtctcgaactcctaacctcaaatgatccacccaccttggcctcccaaagtgctgagattacaggcgtgagccattgcaccaggcctggagctgctatcttctgatatgctgccaaccaggtcccccatctccactccccacagcctctgccttaaaggccccatcattccttccacccacccatggcctcacaggtcccctgctcctccagaccttttgactttgagcttctgctcccactattcaatgcctcattcttgttatacttccagttcacattctcaaaagagggactctgactggctcgtttaatagccatcatccctattgggcacagcaggccacctcataggctcctggccaggcagcgtcccttaaagctggaagcatggcaaggcatacctggctcaacaccacactgtcatctctagtacaacaattaccactgtttgttaaaaaaggaaataatgaatctcatgtctccaattccttaaaatagacatttaaccactgcatcaccaaattgtatgtttcactcactcataagtgaccatataatttatcatccatattgagatatttttgagattgcaaatgggtactattaataattacatcaggcagtcagcataaactgggattgtctctgggaaactaaaacatataataacccaactcatgaggcatatctataacatcaatcccaaacagagtgttagattactacgtatttatttaaatggaagcttttaaaaagtttcaaagtacactttaaaataactaaaaaaataatggcacattacaaaaccagaacaataatctagggcctcagagcagtgtctgaacaaatgatatcggaaacatacaggagctagcacaggccctatgaaaagcaataaatcaacaaagtagaagaaaacactcgttcgtcattcacattaaaaagcacacattaggccattttgatgcaagtgttgttgattcaagacattttatatttttaattaataaatcccttaaatagattttagcctcaccccctccagcaatagattaggtgggaatacacaagcatgtaatggtctaaaatgtttcaaaactaggctgggagttgtggttcatgtctgtaatcccagcactttgggaggccaaggtgggaggactgcttgaagccaggagttcaagaccaacctgggcaacaaagcaagatcctatttctacaaaaaaattaaataaatgacagtagaaaaaaaaacgtgaatatttatataatattctagggaaggtttgttttttgaaagcataatacccatatcaatcattatcccagagacagaaacattcctagagtgggagtgtgcagaaaggtaagataggcaccacctataaaagtgagggcagagtttagagaggacaccaaggagtaataaagccccccagactagcaacaggggcagcccccatcactgctaagtcaagacggggtgcgagggcatcatactgctgctaaaagtggcaaatgggagctctctggcaagagtgtcagtagaggattcagcaagcctcagttaccagcaggagagaatcaccttgacttcactcttctctcacccttgcgtctcctggtcaaacccaaccaggaaccacactccctccaggacagcctccggcagacagcaggatggagccggacaggaagtagagctggaggcaaaaggaaggtgtcgggtgcaaccctcaagccagatcctgggggccaggtttcccactgtcaggaaaaggaatttggaaacatgaaaagggggaaggctagaaagaaccctaaggttggaatggaattgaaggagctggtatgtttaatggttgcattatgtatatgttgtaacttacttaaccacttctactgttgggcattaatctttttctttccttatatcctgtaaaatgctgcaacatccttgtaacctttgcctcctcagctcctactagttccttaggctaaatttctctaagtgggcttaagagctggtcaaaagatacgaactactttaaggctcactatacactgctatgaaactgatttccaaaataactgttttcatttaccagctgtcttctaacatgctgccctgctgggccagtggctcatgcctataatcccaggcctttaggaggctgaggtgagaggactgactgagcccaggagtttgagactagcctgggagagaaggtgggaccctgtctctacaaaaaatgtaaaaattagctgggcgtggtggcacatgtctgtggtcccagctacttgggaggctgagacaggaagatcgcttgaatctgcaaggttgaagccacagtgagctatgattgtgctgttgcactccagcctaggcaagagtgagaccctgtctcaaaaataaataggccgggtgtgctggctcacgcctgtaattccagcactttgggaggacaaggtgggtggatcacttgaagtcaggagtttgaggccagcctagccgacatggtgaaaccctgtctctactaaaaatacaaacgttagctgggcgtggtggtgggcgcacctgtaatcccagctactcgggaggctgaggcaggagaatcacttgaacctgggaggcagaggttgcagtgagctgagatggtgccactgcactccagcctgggagacagagcaagactccatctcaataaataaataaataagtaaaataaaaaataaagtgctagcctagccacagctaaatgcacagtgtggattatcatttaaaacacacgccaactagacagacataatgtagtattttaatgtctacgcttctgtggtgtggtggtgtcagagcttctgttgtatttatttagtgtgggcatttgtcctgtgagttacttaaaagtattccttggcacttaaaaaaagtaattggaaaatgttgcgtaactatttttgtagagacagaaagatgtctatgttatactgttaaatgaaaaaatcatgtaacaaaaatgcatagactataaaaatgaaaaaagaaataagccaggaagaatatatactaaacacattaacaatcattatctctgggcggtgggatggtagagaattctcccatcatctccgtccactcaccagcccctccttctctgttctcgtccacagtacaccagactccacactggtctccagccagcagtcttactttccagcttcgctcccgtgtcatggcctctgaagctgtctacctaacacaaatcccaaatctcaaatccctgaaacatgcccaaatcctaaacgttgtgagtgccaacatgacactcaaaggaaatgctcactggagcattttggatttccagttttcaggttagggatgctctggcaagtacaatgcaggtactccaaaatccaaaaaaatactgaaatctagaacttgtctggttccaagcatttcagataagaaatactcaacccatagtcctttttgatagcagcctattcttgtttcattcatttaatatctgagactcttaagtatatactttttaaggctttcttctacatgtcccatgacctgtttccttaaactatttgctcttttgcttgctaacactgaagattttccttaagtctctagcaagcatagtctacttcttctcatttaagagtgacacactaataacctggttaaaagccgtgtggtaggcatggcctatagattgatgtgtggcaatgtaatatgataaggcagtaatgtgtagagaccccacatgtggggctcggtagcttatttttgcttagactagttacccaaagaagtattctccaatcccctacctgggctgtgtggagtgtaaaactgaccaccagtatttgtgggggctacactgaggaagaaaggatgggaatctcacagttaaatatacgggctttttcggtgctgcttcttggttggtattttttaaaataaatatagattttcactcgctctctgtatcttcacagccttcttcagaaattaaaccttcatgtttaccagaagtgcaagagaaactgccttgctgcaggagatggagaggagacctggaaatcttaactgccaacaatgaacactttcaaaccaccctcgtttccttatctccattctcagaggtgctgggtaccctgcagcctttctggaatttgggggtaaatcattttgcttcctggtatcctctctctgcagcttagacctttcctaacaagctgccaaatgggagacagcttagggcatacaatcacgcaagtgtcctccaaagtcccgaagaacatctgcaaggtggggtggagcataacaaagacttgtccagcctctgcaggcagaaatccagacacctggacacactgcacaattctttcaaaggttccttctactttggttacctaaaaaacatagaggtatactatttttgtgtattgacataaatgcatctattagaccttgggggaaaaaagagttgatggcaaaggatatatgtaatgtgtcaacaagaattcaaagaacttgccattccttgacataggcttaccttgtacctagcaaagcaagctatgggatttctgatcacatttgctagtacataccttcatgacacagactttttagcacttttgttatcaaaagaaaaactcaaaaccgattagatgtcaaaaaaaaaaaaaaaaagaaaacctaaaccatatcctttgttttatgtacacaatttgcatttacttcaatttttgcctaaggaccagtaactcttgcaagaaaaaaaataagagaggtatgcatcacaaagactgatcttatttagtttctatcaagaaaatccatgaccagttccataacttgccacaaaactgaaaaactgtgtggttttgagtatgtacattttggggatttttctttctgagaagggggtcaagagcattggtcagatgctcagagaggacccttgagccaggactgcagtctcctgtgcaccgtggagcctgggagcattgggaagacctcgaagaactctggttcaagtaattgctactttctggaggcaaaagaacagtgccccttcaggacccaccatcgccaacctcaccacagccctcggaggcatctggaaacatgtcaaaaagactttggaaagtattaatttgacatattcatgatgataaggtaaacagaaataacctcctccataaagacaaagcagaaacagcacaatttacaagcgagaaagaataagaagaaacctgaaattgaaataaacttcacactactcctagaagtggttgctacagtagttttaaacgccctttaaaataaagtcaaaaatactgaatgtcataaattccatctgtgctgccctctgctggctacatgaaaagattgttaaaagattgacatagaaattgcaccaaaaaattccattacctggctgggcgcagtggctcacccctgtaatcccggcgctttgggaggccgaggcgggtggatcacaaggtcaagagatctagaccatcttggccaacatggtgaaaccccgtctctactgaaaatacaaaaattagccaggcatggtggcacacacttgtagtcccagctactcgggaggctgaggcaagagaattgcttcaatccaggaggcagaggttgcagtgagccgacattgtgctactgcactccagcctgccaacagagcgagactctgtctcaaaaaaaagaaaaaaaaatttcattaccttttgaacatatatagggagaggagaggcaattcatgttctacccagcgcatgtgccagttcctatgtgtatattcaccagtactgatttcctgaaagggctttgttaatatcaacattggtttgccctttgtccacacacactggctaatttgagggatagtgataataggcttctactatacaggcagacataggcaaaaaactatatacacaataaataataagtaacatgctagaaagtgatgggtgctatggggaaaagagaagtatgtggcagggggtggggtcaggtattgttaagttttaaataagacggtcagaacaggcatcactgcaaagataaaatttaaacctcagttacttcttcctcaactcctccaaaaaaatattcaggattctcttttctaaaattctgaggtatacaaaatacatgtatattcttctctgaacctcctctattcctcaccatgtagactaatgaaattacgcaacacctgcaagattttattacaaaggccactttcccacaaggagacccgagctccaagacccacagtgacagtgcggcgaccgagtttcctacttcctctgtcttcctagggtaaaagtatcactacatggtaacctgagattctcttactttccatctgaaagagcctaacacttttagaatgccgactctcccattttctagctgctcttcacatattgatttactcatcagagtaataatttgaaaggccaggtgtgatggctcgtgcctataatctcagcactttggaaggccgaggtgagaggatcacttgagcccaggagttcaagactagcctagacaacataaacagactccgtctctacagaaaactaaaaaattagctggctgtggtggtgcgtgcctgtagtctcagctacttcagagggcgaggcaggtgatgaccatctgggctcaggaggtcaaggctgcagtgagctgtcatcaccccactgcactccagtcttcgtgacagagtcagactctgtctcaaaaataataataataaaagtgtacactgatttattaaaaaaagatttgactctttaccatgtgttcattctaaatgatgtctgttgaactgtgccaagcactatgttagccaagagctagacctacaaaggtcaagaaaacaaagtatctccctcttcaaaacacaagagttcattggaggacacaggtaatggcagcgccaaaaaaaaaaaaaaaaaaaaaaaaagaaaaaactacatggcatgctaaggatcaggctctgaaggcccagagtatgccaggctcgtagagtaagaatagaaaaagtccctgggaggggtgggaagatagtggcacaggtatactaacgaggggagtgacttttaagaaaatgcacactctcagcagcattctctggtatttaggaagagatctggggagactcaaatactgcactgcggtcccaatcttgaaggatctagaggtcaacatctgcggggaggaggcactgtctgggagaggcaggacatttttagagaatactattcagtgattttagcatgttcacaaagttatgcaaccaccaccactatctaattctagaacattttcatcatccccaaaagaaaaccccataccccataggagtcacccccattcccgcatccccaaacccctgacaaccactaatctactttctgcctctacagatttgcctaatacatggccttgtgtgactggtttctttcacctggcacaatgttttctatgttcagccatgttgcagcatgtgtcagaacttcattcctttttatgactaaagaatcttcccttgtagggacagacttcatcttctttacccactcatgagctgatggcatctggttgtttccactttggggttcttatgaaaactgctgctataagcacgtaaaattttgtgttgtataggatctttaaaactatatctatgttccactttgattaaaataaatttcacagtatttttggcccttgagcccctatgctcgggtccactctcacactgtggagtgtactttcattttcaataaatctctgtttttgttgcttcattcaaaaaaacaaaataaaataaatttcacaatattttctacttttctgaaccctacccattattcaaagtccagctctgcagcctcctcccatcacatggctctctcactgtccgccactgcaccccacacaccggaaacaaactaaagatgctgacccacatttgtggtaagtttcacctctaaacattctctgattctgagagctacgagtcctatcatcaaaaatgaaaactctatggaaccagcttggcgtggttttactggatcactgagtagtcatgccaggtgtcccgtcagctggtgtaagtattgatcatcctgctgtgtgattaacaaatagtttcaacacagtcctgggtcaaaggaaaatgtttacacatccaacaggcccaggttactgtaggggacaacaatgcctaggttatcaggaaagctcactgtttaactggattcaaggaataaattataagcaccagccatttaatgataaatacaattgatctttctagtacttttattacttgagagaatacaggagaattgtctgaagaagggggtaagggagattattcaattaattcattgggttttctgtatacttctaaaccaaattcagttaggaatttttaccaaaaaattccagccttaattcaaggatgtttatgaaagcaaagttctctgatcaaataagagtaagtaaaaacgggtgggcgggaggagtgtgcttgcttttgtcccttgttgctttggagatctactttgatacaggagcactgcagatccccttcctgtttcctttgctctcctgccttactaattatatatcaccccttccttgcaaaaccacaagaccaaatgttacaagttacaaaattggtgtactccacccatcctttactcagctgacacagagcaaactgaaccagcgcggtcctgccacagccctgaagacggaaccatcacatgacagaggagcttgcgagaagggcccaacacacccacatactgtgtgaggcagagcaaaggtggcagcagtaagaccaccaaggtcagccagtccaaacttcttgatacctgttattgatttaaaaacaaactaggccaggcatagtggctcagacctgtaatcccagcactttgggaggccaaggtgggaggatcacttgagcccaaaagtctgagaccagccagcactttgggaggcgaaggcaggcagatcacctgtggtcaggagttcaagaccagcctggtcaacatggcgaaaccccgtctccactaaaaatataaaaattagccaggcatggtggtaggcacctgtaatcccagctactcgggaggctgagacaggagaattgcttgaacccaggagtcagaggttgcagtgagcagagattgtgccattgcaccccagtctgggtgacagattgagactccatcccccctacaaaaaaaaatttaaaaattagccaagtttggtgggtgtgcctgtggtcccagctactcaggagattgaggtgggaggattgcttgagcccacaggtcaaggctgcagtaagctatgatcatgccattatattccagcctgggtgacaaattgagatccctgtctcaaaaaaataataataacaaataaaaataaaaaaataaaaaaaaacctaactaagcagaaaccattgtttaaaatctaattatcttgctttagaaggcaggtggtttcagaaaaaaagaactctaaaacaatctatttttgaagtgtttttttcccaagattttctccaagcttttacttaatacattgttcagatgtttctctgccctaaaaaaaaaattcccttacagttcaaaaaatattcctaacaggtttagaagcagtcctcaaattgcagaaactactattacccaaagaaataccaagtgctcctaaaataataccacatacttattccacaaaatatttcttagcctgctccctctgggtctgaaaaggatagcaaatcaatggccagggggtgagaatatgcttctccacgtgcccagaaggaagggaacatgagatatgggtgcacagagtggcatcagctacgggaagctcatgtggcatccaggcaagtaattcagtggcctccactagcacatcagcagcagagatgcagaaaaacagattacttcaagatgcgttttggaagtagaataaaccatactactaatgaactggataggcagaacaagagaaagggaaggctgatatcaaaacattcaaaacatttgatgggaacacctatgtgagcggatatgctatttctcaggtggggtgaataaagagggacacagcaccaggggctctgctgtggccatgccaactgtgagagaccctgtaggtatcccccaggagatgtcaaatgtggcactgggatgtcacagcctgaagtttaggggtaggaagagggctaagctatagctgattcttgctattcaaagtagttattgtttaaaaagttgttgctgttgccgggcacagtggctcatgcctgtaatcccagcactttgggaggcctaggcgggtggatcacgaggtcagagttcgagaccagcctggccagcatggtgaaaccccatctctatgaaaaatacaaaaattagatgggtgaggtggtgggcgcctgtaatcccagctacagctacaggcagggagtattgcttgaacccgggaggtggaggttgcagtgagccgagatcacaccaatgcgctccagactgggcgagagagcgagactccatctcaaaaaaaaaaaaaacaaaaatagtcattgctaacactgaattggaaaagactaaaccgttgctcctaggggaaatacaggttaggttcctacagacctctggtcacacttttgtcaactgaacaatacataaccttgtttatatgggtttctgtttaaagatggcttatttaatatatattgttgtgttttgttttgtttaagacagggtctcactctgtcacccaggctggagtccagtggtgacatcctggctcactgcaacctctacctcccagactcaagcaatcctcccaccttagccacctgaatagctggaaccatgggcgcatggcggggggacatgggctctatttttagtagacacagggtttcgtcgtgttgcccaggctggtctcaaacccctgggctcaagcaatccacctgcctcagcctcccacagtgctgggattacagatgtgagccaccatgcccagccaactgttgattcattaacattgaactcatggccaacagcactgtaactcattcctgagcaaagcttcgctaacatactatattttctccataaggcacatcatggcctcttgtacttaggaacaatagacagaaattcagcattatgattaggggctattttaaagagcaagtcaccagcaaaggcacaaaaatacaaaaaaaaaaaaatgtaatgctaaatagaccacataaaggtcatttgtttacagtatgagggctgaaacaagaaatcagtcaccttgtttcacagtggctggaaatgtgtacactgagcaaactgcatttttcactgctctgtgaatgtccagaaatgaccacgaaaggactacctttggactgatttgcgggttacaaataagctttagtgagtaggaaaattcatgaatacaaaatccacaaataacaaggattgactgcataaacgaagaaggaatcagagtacaggtatctctctgctattggttatatcaaatgataatttcatcttttttgttttttgttttgttttgagacggagtctcactgtgtcacccaggctggagtgcagtggcatgatctcggctcactgcaaacccggctaattgttttgtatttttagtagagacagggtttcaccatgttggccaggctggtttcgaaaccctgacctcgaatgatctgcctgccacggcctcccaaagtgctgggataacaggcgtgagccaccgcgcccggcctcaaatgataatttcaaatagtctagttcaaagatcctattactgggaaagaaacggagaaatttaacctattttactaatttgcaacatatttcctagatgtttgaaataaggactcctccatctccctctcttcgccagttacaaggctgatcatatgatctccatgttcagatttctttttctatttctagtaggtttagagcttgtgaggaaaaagggaaatgttagttattactcttttccactgtaaaggagttttttaataagcatttttatagagattttcatagaaattacctttaaaaagtacctaattggagtaaaatctctactatcaataaagagtaccagggctacagggataaacaatgctgccgatcatctcagacaggacagagaacttcttttttttgagacagagtcttgctccgtcacccaggctggagtgtagtggtgtgatctcagctcaccacaacctccgtctcctgggttcaagtgattcttctgcctcagcttcccgagtaactgagactacaggtgcgcgccaccacgcacagctaatttttgtatttttagtagagacagggtttcattattggccaggctggccgcaaactcctgagctcatgatccacccgcctcagcctcccaatgtgctgagattacaggcgtgagccactgcacctggccaagagagagaacttcaacaacgtatttcagtttataatcttaaccatgtaaatataagtaaggtcacacacctcatatcacaatgtgattatacagattaaatacgatactgaaaatgttaaaatgcctaattaaatacaaagccataggtagtactataacgcatgaattttgttgttgtttagttcaagactagtcctgccaagacattcataatcttgggaaacaggacacacaagaacacataaagcaagaaaaagtacactcaggattaccaaatctcccccaaaggtttactcttccttttcccaaagtcttaaggcacatgtatgagtgagtgtagggcagggtgggagaggggcaccagagtcaccaggaacatgaggacaatcagaggcaagcctctcatgccaccccagcacagctaacagactgtcaataaatggtcaggctgggcgtggttgctcatgccttcaatcctagcacgttgggaggctgaggtgggagaattgcttgaggccaggagttctagaccagcctgggcaatatagtgagaccctatctctaatttaattataaggaaaaaagaaagaaaaaataaaaacaagtcacaaggccggtgccacaggcaagtgccaaacctccccagaagactcatgctcttggccaggcagtggctcatgcctgttagctcaacactttcgggaggatcacttgagcccagaagtttgagaccagcctgagcaacatggtcagaccttatctctacttaataaataaataaataaataaataaataaataaagataacaacaaagaatcggagggctgctgacatccctaattacatggggtttgtgcactgcccttagggaatctaacagtagattataaacattaactgagcagtaataacagttaggacagaagacagtgtataataaggtactaaatggactaaataggtgatttgccatactccaattatgaaaacaccaacttctgcaaactttaattacttttaactcctgccatctatctcatctggggacatcaatcactgattctttagagtaacctttaattaaaatcttagttccaaagtatgttgtctagtctagtacttcaaacaccaaaaaacccttgcagaattgttctaaaatgatttttaaaataatcccttaaaaaatataagaagtcccccacctcaccccttttttaaaatgattcaccactgagtggtaatgacatcatcaatccagcgtactgcaaacacctggctgatggcatgctaggatcctctcctctagatacacgtggagtagggagggagggtcaaagtggccgttgtgtgaagctatgtcacattgtgtgtcaggaccgtcgtggacaaagcgaccggctactgagaagcagcgcatctagataaactcggaaaggaaaggcatgcgtgtgatgctgacagaactttccaagagcaactgtcttctctgatctgccatgcttcaaaaacaaaccctcttacgcagatttgcccacccataagaatttatacttctagtttttacgtgactttccctcaattttaaggaaatagaaaattgtggggttttttgttttcttttttttttctgagacagggtctcactgtgttgcccaggctggagtgcagtggtgcaatcttggctcactgcagcctcaacctccctggtttaagcaatcctcccaccttagcctcccaagtagctgggaccacaggtgtgcaccaacgtgccaaactaatttttttcttttttatttgtagagacagagtgtcactatgttgcccaggctggtctcaaattcctgggctcaagcaatcctcctacctcaacctcaaaaaatgctacaattacaggtgtgagccatcatgcccagcccaaaattgtgatttttagtacaagaatataaaataaatttttgcatttagtttgtgactgaagttttatgtcacttttttaaggtaaatccatttttaaatttatgcaaaataacatacttataaaaatctttaactgctttgcatattatacttatgttaaataaaagctcttctaagccttattttgaaactagttacatatcatttgtacattccattcctaactaacctctattatattttatatataataaaacatttttaaggggaaaatggtctgtcacacaatccagccattccatgtgtaggtataacacaagagaagtgaaaacatatccacataatgactcatacatgaatgttcccagcagttttatacacaatagcccaaatctggaaacaactcatatgttcatcaacaggtgaagagaccaaaaacgtggtgcagccatacagtggaacattactcagcaatgaaaaggaacaactgatacccccaacaatgaatctcaaacataatattatttatttatttatttgttttgagacagagtctagctctgtcacccaggctggagtgcaatagcgcaatctcagctcactgcagcctccgcctcccgggttcaagcaattctcctgcctccacctccagagtagctttctgtatttttagcagagacagccatgttggccaggctggtctcgaactcctgatctcaagtgatccgctcgcctcggcctcccaagtgctgggattacaggcgtgagccaccacgcccagcctcaaacacatcattctgagtaaaagccagacatgtatgatgttggcagtgggtttatttaaaaaaaaaaaaaaggaaagaaagccagacacagaatatacattgtaacattgtatgatttcacttacataaaattctaggaaatacaaactcatctgtagtcacaaaaaccagatcagtggttgcctggggccggggtagagggaggaatggacagcaaaaggacatgaagcggcggccaggctcggtggcagcactttgggaggctgaggcagggggactgcttaagcccagaagctcaagaccagtctgggcaacataaataaacaattagctgggcatggtggtgcaagcctgtagtcccagctacttgggaggctgaggtggaaggactgcttgagcccaagaggttgaggttgcagtgagctgtgttcatgccaccacactccagcctgggagaaagagcaagacactgcctcaaaaaaaaaacaaaacaaaaaaagaaaaacaaaacaaaaagggccatgaagcatctttttcaggtcaagaaaatattgtgctttattgtgatagtggtttcactggtgtacaaaactgctgaatatatcccatcaaattgtacactatttatttatttatttatttttattttttttttttttgagacagagtcttgctgtgtcacctaggctggagtgcagcagcgtgatctcagctcactgcaaccgtcacaccctgggttcaagcgattcttgtgccacggccactctagtagctgggattacaggcgcccaccaccacacccagctaatttttgtatttttagtagagacagggtttcaccatgttggccaggctggtcttgaacacctgatctcaagtgatccactcgcctcggcctctcgaagtgctgggattacaggcatgagccaccgcgcccagccaaactgtacactttaaatggataccatttattccatgtaaattatacctcaataatttttttaaaacaaggagaaggaacctgaaaagtctgcagcaaatagacaaatggaaattaatgtgctcatcatcaccaattaaaggtgctgaaaatgtcagttagtacccctagtttgctaatgaggctatttgaagtccttcagagaactgagtgacacagtgagaccccatctaaaaaacaaaaaagaatttaaaaatctgtctattcagaactaaatcattatttgagtggactcatcttcaaaagtctttaacacattttggggacacagatgtctattagaaaataccactggggtgagaggatcacttgagccgaggaagtcaaggctgcagtgagctatgatcatgccactgcactccagcctcggtgacagagcaagatctcatttaaaaaaaaaaaagccttcataatcaccaggagacacaaggatgctgagaggttaggaacacaaagttcaaccactggcctatattccaataaacatggcaaaaattagactaagattattcacaaggcggaatttcaaggtttgaatttttttcttttttttcttttttttttttttttttgagatggagtctcgctctgtcgcccaggcttcctgggttcacgccattctcctgcctcagcctcctgagtagatgggactacagacgcccgccaccatacccagctaattttttcatacttttagtagagacaaggtttcactgtgttagccaggatggttttgatctcctgacctcgtgatccacctgccttggcctcccaaagtgctgggattacaggcgtgagccaccatgcccggactcaaggtttgaattttcaacataacttaagaaaccctcatcctttggggggatgaccgtgagtgcagtttaaaaaaaagaaaagaaaccctcctatgaattaaacaggtcttggttagaggtcaaagttctccttctaattagaatgtaaggtacctgagaactctattcatgtctaaattgcaaggcccatagagtgtccagctcattataggtgttcaataagtatctgttgaatagatgaataaaaaacgacctgggaaagaagctgctataattttcccattctaatacatgtaaacactagccgaggttcttagaacaaagttcattctgccaatgctgagagaggcaggaaaaaattttaattatatcagcaacccaaaagattaaaaaaatattcagccgggtgcagtagctcatgcctgaatctcagcactttgggaggctgaggcgggcagactgcctgaggtcaggagtttaagaccagtccggccaacatggtgaaaccccttctctactaaaaatacaaaaaaaattagccaggcatggctacttgggaggctgaggcaggggaattgcttgaaccagggaggtggaggttgcagtgagccaagatcgcaccactgcactccagcatgggtgacagagcaagactctgcctcaaaaaaaaaaattcaaaaaaaagtttaaaaaaatagtaattcaatgtcaggaaggataaattaacaagtatcatcatatactggtatgaggtgtaaactgattcacactttctgaaaacccatttggcagtacatatcaagagactacaaagttaaactccctaacccagtaagtccacttacaggaatctagcctaagaaaatcactggaaatgtgagcaaaactttatccacaagaatgttacaggattctttcttacaggaacaaagtggaaacttctaaataacaagacaggatgattaattaaactatgctccatctatatcatgctgcctttggccgaggccccaagcatccctgcatgtccttgctgagagtgccaaactgcaaggtctgtcttcttgtagctggcgacatgaagttggtcaaggagactgtagcatgacatgcccccattgaggagaagaagcctggcctgtctatcacttgctataaaaagtgctaagcccaggcccggtgtggtggctcacgcctgtaatcccagcactttgggaggccgaggcaggcagatcacccgaggtcaggagttcgagaccagcctgacaaacatggagaaaccccgtctctactaaaaataaaaaattagccgggcatggtggtgcatgcctgtaatcccagctactcgctaggctgaggcaagagaattgcttgaacccaggaggcggaggaggttgcagtgggccgagattgcaccattgtattccagcctgggcaacaagagtgaaactcgaaactccatctcaaaaaaacaaaaaagaaagaaaaaaagaaaggaaagtgctaagtccttggtggtccttggttcctcagctgtaggcaaacccaattcatgcatagacatcatctgggcccatcatgtcaccccacgagacttgaggtcaggggcaccagcactttcatgctgatattcctgctatttgctgtgcgatgtgtactaatctgcctcattctgatccagtaggtctcgttatctactttcggcatccacggagttatggcatgtgcttgtggccctagctactcaggaagctgaggtgggaggattgcttaagcataggagatcgaggttgcagtgggctatgacaacaccactgcactccagcctggtcaacagagtgagatcctgtctcaaaacagaaagaaaatttccataataataattttctcaatgtttgccaaagtgctaaagtaagaagggcacaattgtagccaatcgaagcccactgcctgaggtggcttcattttcagactatatggcaactgccccgaggaaggactaaaaggtactctccaaagacactctgggtaagtggacgcagcctcagttcttcgtaggtctcatgcgcctagcagtctacatcccagcgccaagcctctctttcatccaacggggtaggcaaaggggtctttttaggttgcttcctcactgttgtacagatcagggctctaaaactggcacctggccactggctgcctagcaacagctgcaacataaagagacggtatctcttaaaaggaacaaaacagaaaaccacacaaagacacatggggaagctaaagtgggtaggtagctatatacttggtagctataataaaggagtaaaaacaaaaatccaaggttggttattcttgcttctttcatctgttgagcctcttcttaaaaacctctgtaagttcaaaaccctccaagcggaatactgaatggcttaaagcaaaaccacataaattagatagttacagctgaggaaatgcattcaacactcagccatcccttcctacaatcatggacgcacaaattcttgtgaaatcattttatacactcaacacgggaaatgaagggaagcatctctggccaggccaactcaagccagagcctgcctgtgtgatgtgaccttggagagaacagttagaggttctgaagcgtgagtttccacacctggggtccccaaatttaggggcattagaagtatatttgtgtgcatgtgtgtacaagcatgtgcatgtatgtacgtatttattcattcactcattcctggatctgccctggtacgtttggtatggctagagtaaggaaccagaataaatggcttttttgaaagattcctccagggattctgcgggttagtcaagtatgggaaccaccattctaacccaaatttactagattacgaactttaaaagggaaggctaaacaaaccacttctgcatgttcatctgcctaggacatctgctaccacaattgcaaaaggtgcccatgtggaacggaaaatacatggttgaattttacaaatttagacatataaagctaaaaactcaagaaacactgaattccctcttttgactactgatgttttaattctggcctctatccaaatagcaggtttatatatatatatatatatatatatatatacacacacatacatatatatatgtgtatatatatatatatacacatacatatatatatgtatatatatatacatacatatatatatgtatatatatgtatgtatatatatatacatatatatgtatatatatgtatatatatatatacatacatatatatgtatatatatatgtatatatatatacacatacatatatatgtatatatatgtatatatatagtttaaaagaaagcaacaacattctactatcttaaaaccctcttttctaaacactagaaaatcaaaaatcgcattacaacagaacttaagacttttaaatagaagtgaaaaagtaattttacacaaaaagcatcatatacttatctttctaaaagttacaggtatcaagtaagtctgatgacatcacttctcaaaatcaaaatatatcccagatgctcctcaacttacaatggggttacttcccaataaacccatcgtaaagtcaaccataagtcagagacagtctctatatattttcttgataaatgggatacccacctcccgggttcaagtgattctcctgcctcagcctcctgagtagctgggactacaggcatgcaccaccacacccggctaatttttgtattttttgtagagacagagtttcaacatgttggtcaggctggtctcgaactcccgaccttgtgatccacccacctcggcctcccaaagtgctggattacaggtgtgagccaccgcgcccagcctcgcgatttccaagttttcagtcacatagcaatgctacaataaacacccttgtgcacacattctggtacacaacagcagttccccaccttctgagtcccaactcaagaggttcttgttttcagatttcaagtttcagatctccaaggggaactaattctcacaggaactgctttttctagtcctgctctaggctggaatggggtgatgtgtaacctatttttgtgttaaaatcaattgaccttgggaacgtgataatacagggaactaaaagcactcacactactcaaagcttattaaaacctctttaaaaatcaagaggcaggggccaggcgcggtggctcacgcctgtaatcccaacactttgggaggccgaggcgggcggatcacgagatcaggagatccagaccagcctggctaacacggtgaaaccccgtctctactaaaaacacaaaaaatcagccgggcgtggtggcgggcacctgtagtcccagctacttgggaggctgaggcaggagaatgacgtgaacccgggaggcggagcttgcagtgagacgagatcacgccactgcactccagcctgggggacagagcgagactccgtctcaaaaacaaaaaaaaaagagtgttatttttaaaaactttttaaagcttaaattcctcttattagaatgctatacacacacatttatacgtttgagaaaacagtagtccaaagcaagagcaggaaagggaaagaacagtagtagtcagctagacatttggttttgtatccttaacatctattctgagtggaaattaaaccaaatgagcctttaacataaacgtttgaaagagtaacagcatctggcctgcttcctccatacaatgaggtgtccatcatgtgacatgggggaaaacagcagatttctggaaaaataattaccaaataatgttgtgccaacatcttctagaataataaacttctttttcctatcaaggtccattgttcagggacatttccattacctgacaacaggaaaaattatctttactctcagagtacaaaaacattcctaagaacagagagcaacaacataaccttctgactcaagatagtctctgttccggtaatttgatgacaaatagtgttgctgatcagcagaatatagagtggaaagggcggcttttttgcacatgccttcccctacctttgaattaggagcactcttctaaaactagaaatgcttcacgaagtcagacaaagtctacaaagtactgcaatacttaatacccatgaggcacacttccataagaagaaaatgatatgcaggaaggattaaactgcccattctcacaagaaacattccatgggcaaaggcactaaggtagatgtatagatgtagtcggcaggataatggtcccaaagatatacatgtcctaatcactggaacctgtgaacatgttaaattccatggcaaaaggggattaagattgcagatggaattacatctcctaatcagccaactttagaagagggagattatcctagagtatccaagtgggcacacggattcttccaaatggaagagggaggcaggacaatcagtgtcagagtgatgagaggtgagactcaatcagccactgctggctttgaagatgcaggaaggagctaagagccaaggagtgtgggcagcctttagaagctggaaaggtaaggaagtagatctttccctagagcctccagaaagaaacacaaccctgctgaaatacattttggcccagtgagacccattccagacttctggcctccaaactgtaagataataatgtatattgtcttaagccactaaatttgtgataatttgttatggcagcaacaggaaactaatacaatggaaatgtccgtccggctgctttctggatgtttttaatctcaaaaaaagacttttggccaggcacggtggctcacgcctgtaatcccagcactttgggaggaagaggtatgtggatcacctgaggtcaggggttcgagaccagcctggccaacgtggtaaaaccctgtctctactaaaaatacaaaattagccaggagtggtggcatatgcctgtagtcccagctacttgggaggctgaggcaggagaatcgcttaaacctaggaggcagaggttgcagtgagccgaggccgtgccaaaaaaaaaaaaaagacttttaatccctctcaagatacacacatttatatacacatttgtcaaacaccttaatacttcctagaataaagtggattcacaccacaaatcaccttactgtaggttatagagtagtccctccttatccacaggggatactttccaagaccccccacggatgcctagaccacaaatagtagtgaaccctatatacaacatgtttgttcctatacatacatacctatgataaaatttataaagtaggcagagattaataataaactaataataaagaacattataataaataataaagaacaataagttgttctataaaatatgctgtaataagagttacgtgaatgtagtctctcaaaatatttccttgtactatactcacatattttcaaaccacagctaactgcagataattgaaaccatggaaggtgaaaccatggataagggggaaagtatgctagcctcctcttaaagaatttatttgctacactcatctttcaaacatagaataggccaggcgcagtggctcacgcctgtaatcccaacactttggaaggctgagataggcacatcacttgaggtcaggagtttgagaccagtctggccaacatggccaaaccctgtctctaccaaaaataaaaaaattagccaggcacagtggtgtgcgcctgcagtcccagctactcgggaggctcaggcaggagaatcgcttgaacccgggaggcagaggttgcagtgagccaagatcccatcactgcactccagcctgggtgacagagcgagagtctgtctcaaagaaaaaacaaaacatagaataatcattttcttctttttataagctcacaactaataccataaaataatatttccatctaaatgtcttttttttttttttttaagacacagtcttgctctgttgtccaggctggagtgcagtggcactatctcggctcaatgaaacctccgcctcctgggttcaagcaattctcctgcctcagcctcctgagtagctgggactacgggcgcaccccaccacgcccagctaatttttgccaggatggtctctatctcttgacttcatgatccacccacctcagcctcccagagtgctagggttacagatgtgagccaccgcgcccggcctaaatgtccctttttcaagatttgtactgaaatctctgaatgcataaaaaatgtctctataaacttcccagcaagtcaacagtgaggaactcactaactggttatcaacataagcagtttcagcaagaaccaggcttatatataaaccccaaaataatggaagaatgaaattagatgtatgcacgaggtaagagggatctattttaactgcaactcccaagtttccatgagcaatttcagtgacctttgtttctatatcaaaagcagagggagtgggggagcatggatttaatgattcagtcaacaagctctgagagcctacaatgtgccaggccctgtttctggcatgcacatgggataggggagagtaacaaaagggatgaagattcctgccttgtggagtttccacttcagctggagaagactgaccatgcgtaataaacataatgagtaggttcccgggggatgagcattattgggagtcaagcagggtaagggtggcaagcagagaggaggggggcactggctgctcaagcaaacaggggaagtcttgtcgagagagtgcgggaactgagcatgaggttatttggaggaaaagcatccctagcacagtgaatagctggagaaaggcccgagctggggagcgtgcctggtgtgtaccaagcaccgcaaggagtttgctgagtgcatgagcagaggggcatgggtatccctgatgggtcccaaggaacaggagcaggatcaccgggaggccctccctgaggcatcagtagactcaaagagaagccttcctcagtggaccatggaacacacccagaaaacggggctccttctaaaggtagaccccaaagtctaggttggaatccctatttcttttgggatatcataaacccataaaataaatatttcaattataattctaaaaatctttttagaatttaatttcctccatgctttgtcactgcagtctggacacagagaaatcgcagaagtctttgtcaaagttagagaacaagttgaagaagtctccgtcttcaataaatcagtaaaagccagtgtggagtagaggagacaagcctgaagtgggctattcagaagtccaagagggtttcaatgccaagcaaaacaaatggcaagccctcaaaagctgtatctgactctattttattgtcagtttgctgtcctgactaaacagaaggtttagtcaggatggtcccccagatggtcccccagaagacaaacaccaagaggtgccacagcacaagacagtggtgtttccagggctccctggatgtgctccccaagaaccagagtccacagctgagctgagagcaggcaaatgatcacaacttgattttttttaaatcctgcaatagcatgaataaagtggcacaaatccaagtcctaaagtctatttttgaacctgcaaagctagagggtcttgtcttgagatccttggtgaccctaccacagtactcacattccaatgaggccctgtcaaaaaccagccttaggctgtgcacggtggctcaaacctgtaatcccagcactttgggggtgggaggatcgtctgagcccaggagtttgagaccagccagggcaacatagtgagatcccatctctacagaaaaaaaaaaaaaaaaaaaaaagccagcccctcctctagcaggagacaaagcttccaagtcaggacttcgggcaggaagactctgggagctgctctgtaactccctggaagaaacattattctgctagtgttctcctgtctcactgttaaatgagttctttcagcagcctttttatttagtcataaagggcaaaaaggctaagagaagccatgaaaagacccctgaaaatggctgagagacaagctcagtaagattcgttaacctttacctggttacctggatttctcataaattctagtggcccaaccacaaaacatgttctggctccagggaatcatcaaaggccaggctgagtaattcttgttgccacaacatcaaacccagtttaccagagtccctggaaggaaacagcagcccctaaactaaatgctacccgggggattaaggaaaaagatactgcctttactgcatgatcctacaaactcctcaaatttcaaccctaagattaacaatggctctttcaatgtaaatgtgtttaataaccagcaacacaggtttaaccaaaactctgtccaaactatatcaagatacaaaactctgtatccactcccagaagaaagaacgtttagaaagtacataaattcatctctgagaggtctgagaaaaagaaaaaacaatgaaaagacataaatagcatataaggtatgtaaaagtacaagacataaaaatgaagaggggggtgtgaatgagcagccagtatagaaaaagcccattcaaagcatggcctgtgcatggagcctgagaaatctagcttgtggtgccagctcaaccactcagcagctatgtccctttagaatctctctacttctccatttcctcacctataaaatcagtacagtatttgttgccacccacagggtaactgtgagggttcaatgagaacttacgaaaaatgttcagcaatgaacttcatgtgcagcaagcagttaactgctagtgtgggaacagctagagcagtgacacctactctggcatgttcccatctcacttcatcccagtaggtaactgcctgttgggtttgctcaaaagtacgtctcagccgggcatggtgtctcacgcctgtaatcccagcactttgggagtccgagatgggaagactgcttgaggccaggaattcaagaccagcctgatcaacatagtgaatccccatgtctaaattttttaaaaccattttttttaaagtacatctcactcagaacacagtgaaagctgaaagtccccaggctcccatagcatttgttggtatttccaccatagcaaatttccacgtgaaccgccctacactgtgagcttctggaaagcagggcctatatcttaaaattcttcacagcctgagcataaagcaaataccctgacacaaagaatttaaaaagtctgaacaaacggatgaatagatgaacaaatggatgaatagatgaacaaatggatggttgaatagatgaataaacggatggttgaatagatgaacaaacggatggttggatagatgggaaacaatttaaatggcaagaaaaagaatccagtgtttttttcaagccataatgattgcagtgataagtgaatggtgataaaagtttaaaaattagagaggtctagaggtaacaccagaatgaaagggccaggagcaagtctcggacatgctgaatcttggacaatgatgggatatccaaggggaaatgtgcaggaagcacttgaaaatgccagaatgcagctaagattcaaacgttctcttaatttcaatcttagggctgttggaaataatatttcagagaattagagaacacaaaagaaaggaagttaaacaggtttcaaaaacacatatagtctgcagctgctgtgtacagaagccagaacagacaaaatgaaatgtgagaccgatcgtcctggaggtttacaacacatcacatatgaatgttttcattcaagactggctcggaatcattgtccaaaggtataaaaaggagtctataaatactcttaatatcccccagaaaaatacaaaaagctctccactctgcaacttccagctcctgccctctctctctttccatttaccatctagttacctgaagagttatatacatttgccttcaaagtttccctttcagatctcttcctctacccagcccttcagtggtggtattccaagacgacatccttggactcctcaatcagcccgtggcatcacccactccctgggttccactcccactcctgcgttgatcatctctggagttgcaggttcaaattcaactatttaaatgggtctctcaaagtggacactgtacaagtaccacaaaactccagagattacgtccaaaaccgaagtcctattctcagtatggaaactctccaagcagtcatccaaagacagaaacctggtgctcaccttcgtcaccctgtctctttcatctcctttcaatgctatgtccctcccaaacactggcaaccaaatccatcaatttcatgtccttcactggtcctgtattttttctctcctacctcctactcccacagcctgaattcaagccctcatcacctagctcacctatctccaaaaattccttaagggtctctccactgccaatctgagccacactaagtcagaagaatctttctaaaatgcaacagaatgctctgcttctccctctccttgcctccacctgcttcctttctctctcccttccccctcttggcaaaaataaaaaataaaaataaaaaaaagaacgggcgcagtgcctcacaccagcaccttgggagatggaggttggcaaatcacttgaggccaggagatcaagaccagcctggccaacatggcaaaacccagtctctactaaaaatacaaaaactagccaggtgtggtggcacatgcctgtaatcacagctactcaggaggctgaggcacgagaatcacttgaacccaggaggcagaagttgcagtgagctgacatcacgccactgcactccagcctaggcaacagagcaagactatgtctcaaaaaaaaaaaaagcaaaataatcagcataaaatatccctggtttaaaccctctcatagctccgtgtcccacagaataagtcctgtgtaacaacacatactgaagccccccataactgtcccccatttctctaaccctgcctctggcctcctccctctgctcacagcctactctccaggcacaaagaaccatttgtagctccccaagtggcgaaactgcttcacacctcctgtcctctcattctctttgctttgatatatacttctttgcaatgttctcctacttggcactaactcatctttcacaatccagcccaagggccagctcctctacaaactctcccctggccaatccagtgccatcccagcgccagtggaactggcactgctctccttggtttacctacatttttcatgcacacacctgccacatctactgtgacacgctccttcacagcttgctgccatgtttgtctcctccttctagactcaaagcatcggtgacaacagggactacatggtatgaaatgatcactcatgcttgttgactgaataaaccattacaaactactcatagaaaccaatctgcgagccggatgcagtggctcacacctgtaattctgacactttgggaggccgaggcaggtggatcccctgaggttcggagttctaaaccagcctggccaacatagtgaaactccgtctctactaaaaatacaaaaattggccaggcacagtggctcatgcctgtaatcccagcactttgggaggccgaggtgggtggatcacgaggtcaggagatagacgccatcctggccaacatggtgaaaccccgtctgtactaaacatacaaaactgagctgggcatggtggcgtgtacctgtaatcctagttactcgggaagctgaggcaggagaatcacctaagccagggagtcagaggttgcagtgagccgagatcgcaccactgcactccagcctgacgacacagcaagacttcgtctcaaaaaaaaaaaagaaaaatacaaaaattagccaggcatggtggcgggtgtctgtaatcccagctacttgggaggctgaggcagaataattgcttgacccgggaggtggaggatgcagtgagtcgaaattgtgccactgcactccagcctgggcaacaagagcaaaattcccatctccaaaaaaaaaaaaaagaaaagaaaagaaaagaaaaaaaaaaaaacaaagaaatctgtgatattactacaaaataggcgggttttttttgttttgttttgttttgttttgtttgagacggagcctcactctgtcacccaggcgggagtgcagtggtgtgacctcggctcactgcaatctccacttcccgggttcaagcgattctccttgttcagcctcccaagtagctgggactacaggcgtgcgccatcacgcctggctaatttttatatttttagtagagatggggtttcaccatgttggccaggatggtctcgatctcttgactttgtgatccgcctgcctcggcctgggattacaggtgtgagccacagagcccgactgaaaataggtttttttaatagccttagccaattccatcattcatacctaacactactaattacaacatagatttaacaatgccaggtaagggcacgcttctgaaatagaagccttgaagactcaagaaaaggtagaaaatggccaagtgcgggagctcatacctgtaatcccagcagtttgggaggccaaggcaggcatattccttgagctcaggggttcaagaccagcatggccaacatggtgaaacaccgtctctcctaaaaatacaaaaactggccaggcgcagtagctcacatcggtaatcccagcactttgggaggccgaggtggacagatcacatgaggccaggagtttgggaccagcctgcccaacatggcaaaatcccatctctactaaaaatacaaaaattagccaggcatggtggtgcccgcctgtaatcccagctactcaggaggctgaggcaggtaaactgcctgaacctgggaggcagaggttaagagagctgagattatgccattgcatgccagcctgggcaatagagcaagaccctgtctgaaaaataaaataaaataaaaatgtaaaaataagccaggtacagtggcacatgcctataatcccagctactcaggtggatgaagcatgagaaatgcctgaacccaggaggcagaggttgcagtgagccaagatcacgccactgccctccaacctggacgacacagcaagactgtctcaaagaaaaaagaaggccaggtgcggtggctcacacctgtaatcccagcactttgggaggccgaggcaggcagatcacaaggtcaggagatagacaccatcctggccaacacggtgaaaccctgtctctaacaaaaatacaaaaattagctgggcatggtggcatgcacctgtaatcccagctacttgggaggctgaggcaggagatttgcttgaaccagggagttggaggttgtagtgagctgagattgcgccattgcactccagcctggtgacagagcgagattccatcttaaaaaaaaaaaaaaaaagaaagaaaagaaaaggtggaaaatataaagacttggataaggaaggtattatcctggcccttactataaaattcagtcactaaagaaagcagctaataaccatctcactaccataaaagcagaaatatacaatgtcacgctatcctggataatgaggagtcatagaaatcccctacatacccttcactgcttttgtgtttttctgaagttaatgcaaacagagaagcaaaacaacattaccagcagtttcagaggatgtgggattcacttcttgatcatttctaaataattttccacctcctccatgcctctatgattgcaactgaaactaaattgcaacaataattagagacaatcaagtagtgtggcaacggagcaaatggacaggttcaggcaaagttcttttctttagaagcccactctgaagactttcatcttggagaggagagcaggaaaggtgtggaacaataacaggaaagcagactcgaccagactcgacacggctctcaagttgaagtcttccaccggtccagcacaatacacagagatgtttcatccctttcatctctcctgttccaaatgacctatgatgtgtgccccccatacttgaaataagaaggcaatcttctaattcttactatagaataagtgtcctaactgatcgtgaatgcaagaaatactgaagaaaaaatctgtttgacataatctcttttgattaacacatggaacatttagaaaggagcaggtatgagccataagattccagaaactgaagtgttttgttttgtttcgtttttgtttttgttttttgagatggagtctcactctgtcgccaggctggagtgcagtggcgcgatctcggctcactgcaacctccgcctcccaggttcaagcaattctcctgccttagcctcctgaatagctgagactacaggcgtgcaccaccacacccagctgatttttttatttttattagagacagagtttcacaatgttggccaggatggtctcgatctcttgacctcatgatccggccaccttggcctcccaaagtgttgggattacaggcgtgagccaccacacctggcctgttttgtttttgagacatggtctcactctgttgcccaggcaggagtacagtggcacgatctcagctcactgcaacctccgcctcccaggttcaagcgattctagtgactcagcctcttgagtagctgggatcacaggcaggcaccaccacacccggctaatttttttttgtattttagtagagatgggttttcaccatgttgcccaagctgctcttgtactcctgagcttaagcgatctgcccacctcgacctcccaaagtgctgggattacaagcatgagccaccatgcccagcctgaaactgaacagtttatcattataacccagaccaatacaatctgtttaattcacaggaaggtgtggtggctcatgcctgtaatcctagtactttaggaagccaaggcaggagaatcacttgaggccaggagttcaagaccagcctgggtaacacagtgagaccctgctctatttaattaaaagaaaaattatagtttcaaaaaaaaaatctactggccaggagcggtggctcacgcctgtaatcccagcactttgggaggccgaggcggacggatcacctgaggtcaggagtttgaggccagccttaccaacatggtgaaaccccatctctactaaaaatacaaaaatcagcagggcatggtggcgtgcgcctgtaattccgctactcaggaggctgaggcacaagaattgcttgaacccgggaggcagatgttgcagtgagccgagattgtgccactgcactgcagcctgggcgacagagcaagactccatctcaaaaaaaaaaaaaaaattaaattaaattaaattttctaaaaatctatttaattcacaatttcttctcgtaaggaaacattttgtagttggccagaagacaatatatgggttgagagatctttcatctttaaaagaaaaattaaaagaaaggtaaacgactgttacaattagccaaaatctaacctaaaccccagtcaaaactgatacacattttccccatgcttaaaacagtgacaaaaacctgtaaatcactttatttgatagaaaagagttaacctaagttaagtaaataaaccatcatttcttatgatgtagccagttcataatacacaaatatgcaaaataaaaatttttttcaatccagctagtgatcagtagatttaataagtcaccattttgtaaccaccaaattcagtttgtttgcttgtttgttttaaaaaaaaacttttaaaatgttgatcctcactgagggcacatttgcactattacaggtacgtgtactgatacattgctaagaaaagagtaaattggtgcagcccttttggaaaaagttggcaccagacatcaagaattctaaaaatgtttatactctgacatgttcatgtcaccctgagaatatatcttaaagaccacaaagtgtgtataattatggcaaccttatgttccagattttctaagaaggtgttcactgtaaataattgtgttcttttcaataaaggcaaatcagtaagttagtaactaagtttgagaataatggaagtcatccatatcatagaaaaacaaagaaaacgggttctgcatggggtcaaacatgcacagaagtgttctggtttctgtttgaaatggagagttgaggaaaaaaactcaaactcaccacatattaactttttacaagatggaacttggttcaatccattattccctccacagttgctgagctgcctctgtagggccccaggcaccatgcctattctggagacatggtgatgaaaaggcaaatctttcttaaatgcaacaggctcctctccccagcccgcagcagcacccagacatgccagtgcccagaccttatttttcttgttgaatcttctcaccacccacacacaggtctccatggtacagcatgacagctcttcctataattctgatataaatcctccttttatccagagtctttggtcacaaaccgtaatacatacatgtgaaatgttcccaaatcttgagtagacactcaagattatgcctgtgagaaaactcctttccatgaaaacacagaagaaactactctcttttcttatcaaacccccgaagtacccaccagggcattcggcatgggaaatcgggttagaactgccgcaaggcactgctccctcagacagcccaccacctgtggctggcataacggccctggacttgctgcctgctttccctctgtgccactaggcacccacccctgcagtcaccccagctcccgaggcatcacaccatccacagaccacagggttagtcctcctgaggtccctctgtgtgttatgacaccacacctaacccggcacagaaaccaggctgaacaccctgacagtctcctgtggcccatgaagattgggggggccgctgggggttaggggaagaggagagatggaaggaagttactaattaagagtgatcttgaaagcctcgggtgctaagggtcttttttctttttacccctgtcctgagtattcccttatatccttccctcaaaggccaaagctagagacagcagatacgtttttatgcaattggacctcaatgcttctcgaaatatgcgaatgaacaactttcttgaatgtcttaccccaccactcttcctctacagagaaagtgaaacctcgtttttttaattcttgctgaaaacactgctattttaacttgaaatttgttctttcttgttttagataatgaattagttctacctttcctgctttagataatcaatctgggaactcaatgtaaaaattacatcaaaggcaaataaaaagtaaggtatttcagaagctgaataagtaaaggacatttgcagacgtctcttccttttcatttgaaaactcacctaaaaattattttaaaattctctgttgacaacttccctaattgaagctaacttcttgaaaggaacaaaaataagacatgcatttgctataatgaacatgatagactccagcaactttcattttaaatgtttatatagaaattatgcttaaaggccaggcacggtggctcatacctgtaatcccagcactttgggaggctgaagtgggcaaatcacctgaggtcaggagtttgagatcagcctggccaacatggtgaaacctcgtctctactaaaaatacaaaaatcagccgggtgtggtggcacatgcctgtaatcccagctacttgggaagctgagacaggagaatcacttgaacccaggaggcagaagttgcagtgagctaagatcacgccactgcacttcagcctgggaaacagagtaaaactctgtctcaacaacaaaaaaaagaaattatgcttaaaaaggaagttcataattgaatcacggcaactgcagtcattagccccaaaatgatgaccattacagagcaacaggatgaacatactctctggaaaatcccgcaaatactcccttaaagtgcattatatgtggttttctgtttacaaccctgaacattattacacagaaatatatactggcaacagtacacacaagccaggcgcaatggctcacacctgtaatcccggcactttgggaggctgaggcgggcagatcatttgaggtcaggagttcgagaccagcctggccaacatgatgaaaccccatctctactaaaaatacaaaacaattagctgagcgtggtagcacacgcctgttgtcccagctactcaggaggctgaggcacgagaatcgcttgaacccgggaggcagagggtgcagtaagccaagatcgtgccactggactccaggctggacaacagagcgagactctgtctcaaaaaaaaaaaaaaaaaaaagtacacacagtatgcatgttataaagaaaatgtatgcaaaatttaatttttacgatttttttctttttcctgagcagaatagtattttcttaagttaatggtttgtctggtgggactccacagtgccataaacagtttttttttttttaaaaaaagaaaccaataggccaggtgcagtggctcacacctgtaatcccagcactttgggaggcctaggcagggggatcacctgaggtcgggagttcgagaccagcctgaccaacatggagaaaccctgtctccagtaaaaatacaaaattagccaggcgtggtgacgcatgcctgtaatcccagctacttgggaggctgaggcaggagaattgcttgaatctgggaggcggaggttgcggtgagccgagatcgccccattgcactctagcctgggcaacaagagtgaaactctgtctcacaaaaaaaaaaaaataaggccgggcgcggtggctcacgcctgtaatcccagcactttgggaggcggatggatcacgaggtcaggagatcgagaccatcctggctaacatggtgaaacgccgtctctactaaaaatacaaaaatttagccgggtgtggtggcgggtgcctgtagtcccagctactcaggaggctgaggcaggagatggtgtgaacccaggaggcagagctggcagtgagccgagattgcgccactgcactctagcctgggcaacagagcaagactccgtctcaaaaataaataaataaaaataaataaattaaataaataaacaaaccagtaaagatatatcccacacaggtgtagtctgaaccaaactgtccctatctaatgaatacaaaagagtactggaactgagaaagcctttttgttggtttttgaaattgtctttaattggacagagaaactctaagactctctttctatagcatattatcaatgagctatgttccaaaagttttttaatactaaaaggtagccaggaaattacaatgcatttccctccagaaagaattctaaagccgggcgcggtggctcacacctgtaatcccagcactttgggaggctgaggcgggcagatcacgaggtcaggagatcgagaccatcctagctaacatggtgaaaccccatctctattaaaaatacaaaaaaaaaaaaaaagaaagaattctaaaaacagtggtacctgtcctaggctgattcacaaaacgttaccaacttacgcagcagggacagggacagggacagaggaagcactgttgaaaacagcgcacacacaaagttaacaccacaagaaatgtttctcattattctgaaaatcaaatattaaggtttaggctgggcttggtggctcaggcctgtaatcctagcactttgagaggctgaagcaggcagatcaattgaggtcaggagttcaagaccagcctggccaacatggggaaaccccatctttactaaaaatacaaaaattagccagacatgatagcatgtgcctgtagtaacccctactcagaaagctgagggagaatcgcatgaacccaggaggtggaagctgcagggagctaagactgtgccaccacactccagcctgggtgacagaacaagactgtctcaaaaaaaaaaaaaaaaaaaaaaagggaaaaaaaattaaggtttaaaaagtttatttagggccgggcgtggtggctcacgcctgtaatcccagcactttgggaggccaaggcaggtggatcacttgaggtcaggagtttaagaccagcctggccaatatggtgaaaccccatttctactaaaaacacaaaaatcagccgggtgtggtggcaggtgcctgtaatcccagctacttgggaggctgaggcagaagaatcacttgaacccagcaggcagaggttgcagtgaaccaagattgcgtcactgcattccagcctgggcaacacagtgagactccatctcaaaaaaaaaaaaaaaaaaaaaaaagaaagaaaaagtttaattaggcctggcacagtgactcaacccaacactttcagaggccaaggcgggaggatggttttagaccagcctgcgcaacatagtgagactctgcaactatttaaaaaataataataataaaaagtttgtttaaaagaaaacaatggaagttctgaggtgacgtctgaacacgtcatgttatatgctttatgaatccatcacacacatttccttttacaatgtgggatctggtcaaggtaaattctctgtgaaacctatgagggaaatggacagttctggagactaacacaaaccttaaagaacttgggagtcttattcttcatatgatcatcttacaccatcaggtactttttgtgtggtgaccctctgggtggggaatcttcaatctttttagttcctccaaaataaaaggatgatatttaaaactgtagaaaggggaacaggccaggcggggtggttcatgcctgtaatcccagcactttgggaggcttaggcaggcagatcacctgaggtcaagagtttgagaccagcctggacaacacagagaaaccctgtctctactaaaaatacaaaattagccaggcgtggtggcgcatgcctgtaatcccagctactcaggaggctgaggcaggagaatcgcttgaagctgggaggcagaggttgcagtgagccgagattgcgccattgcactccagcctgggcaacaagagtgaaactccatctcaaaaaaaaaaaaaaaaaaaaaaagaaaggggaagaataaacttacaaactttctcatcttcgtgtgtggcagacagaataacagcccctaaagaagtccgggtactaatccccagaacttgtgaataggttaccttacatggcagaaggggaattaaggtaacagatggaattaaggttgctaatccttagccttgattatccaggtgggtcccactataatcacaaggatcttaataagagggaggtaggaggtcgagagaaatgagaagatgctacctgctggctttgaagatggaaaggggactatgaaccatggaacacaggtggcctctagaagctggaaaaggtaaggaaatgggttctcccctgagcctccagaaagaaccagcctgtccgacaccttggctttagcccagtgagacctattttggacttctgacagcagaaccctaaaacaaatgttatgttgttttgagccaccaggcttgtggtaatataacaggtataggaaactaacacgccctgcttccacttacctctttcaagtacaagttcatgtcatgcctggtggcaaagcagtcactgtattaaaagcaaccagaccaatagcttcctgcccacggcagcaggcaagaacacaagagaggccacaaaagcctggtaggcaggacactgggatctgagggaaattaaatggcaagaggaggcagagaaaagagcagcaggcaaaactgctgtcggcttctcagcagtgggcaggagtgaaatctggaggggctgaacaatcttttggggccagccagtgggtgatttttcttttaatcacaaaaggaggctgggagcagtggctcatgcctgtaatcccaacactttgggaggccaagataggaactggagttcacaccagcctaggcaacatagggagacctccctctctacaaaaagaaataaaaataattagcagggcgtggtagcccaggcctgtagtccaggttacaggaggggctgagaagagaggtgagaggattgcttgagccaaggaagcagagcgtgcagtgagctatgagagcgcccctgcactccagcctgcgcaagagagctagaccctgtctcaaaaacacaacaaaacaaacaacaaaaaaatgcacaagctgcttttacttgtttacttataaggtaacaagtgggctgggtgtggtggctcaggcctgtaatcccaacactgtgcgaggcagaggtgggaggactgcttgggtctaggagttcaagaccagcctgggtaacatggcaagaccccatcttttaaaaaagtaaaaaattagggctgggcgcggtggctcatgcctgtaatcccagcactttgggaggccgaggcgggtggatcacctgaggtcagaagttcaagaccagcctggccaacatggcaaaaccctgtctctactaaaaatacaacaattagacaggcgtggtggcacgcgcctgtagtcccagctactcaggagcctgaggcaggagaatcgctcagctcacccaggaggccgaggttgcagtgagccgagatggcgccactgcactacagcctgggcgacagagtgagactccgtttcaaaaataaaataaaataaaataaaataataaaataaaataaaataaaaaattagccgggcatggtggcgtgcgtatggttccagccactcaagaggctgacgtgagctacgatcacgccactgtgctccagcctgggtgacagagcgagatctcgtctcttaaaaaaaaaaaaaaaagaaaaatgtcccattagttattaaactagaattgggttccatttggccacagagttctgctttatttgtactttgctaccaaaccacaaaagttcaccacttgttctatttgccattcttccttttaattcctcatgaacaaacttaataaattaactacagcatgtcaaacaaccttttgcaacccttgcaatttcaaactcttggagggaggcacccctggcctgggccagcagcctcaacgcgcgggagcgaagggagcgggacagcggctccgcttgccaagtccccagtcaggggaggagcggcgtccccaccgcggtgcccctcgggctccacacccgcgtctcggcaggcggcgacgcaccggaccggcggctaccgggcccagactcccgcgggcagggccgtcccggagcccgcgcctcgccggcggcgccgctccccgttctcatttctgaacaaagacgtggaccgggcacaactcgctgacgccgagagcggccggaaactgcggggaacgcgggcccggccatccgcgcgtccgccccgagccccgcagaggggcggcagggccagcgacctccacccctcggccccccgggacccggactgcgacccctgccccggggaccccagcgaccccaacgactctcatccctcagagcccctgagatcctgccccgcgaccccaacgaccctcattcctcagagctcgcggcgacccctggccccgcgagaccgcgagcccggcctgtgacccccgccccagccacccacatccctcagcgccgccagcgaccccggccccggcgaccctcatccctcaaaaccccctgcgacccccgccccgcgagggccccgcgcaccgctcgcccgccggtcgccccgggctccgcgtcccgcaccagtgtccccgggaaacgccagccgccgcaagcgctgccggacggccgggcccggaggggactgggggacagcgagggggaagcgtccgccgccggggcgcactgaccgtagctgtcgtcctcctccatggtgcgggagccgggctccgcgctccggctcgccgctcgcgtcccgccgcgccacccgcgcccccgctcgcctcagcccggctcggagccccgcccccggcgccccgcgccccgcgccccgcccgcccgcgcctgcgcctgcgcccgccccctgcccccggcccgaggccccgcccctcgcccgaggccccgccttcctcccgcgcgcgccgcaccccgggtacccggcctcctcccgaggctccggcctgcgcacgcgcgtccacccgaggctcctcccctgcccccgcctctagaccacgcccccgtcccgagacacacacaccccccccccttctcccggtccgcctcctggggccgagcaggtttcggtttctgaagggcggtgcaagtccccggggtggcggactcgacctggcctgcagccaggctactgcacgaaagcccaaggtcgtgtccggccactgaagggcagggtggtccttgctgacgccaacctggaaggtcagacccggccccagcttgccagggagggcccggtccttggcgaaaggccacaaaagctatttgaagtcatttactcctgcgttcagaacctttacatgctgtatgtcctaagtttactgcttctacttctttttatttgtcctgagttttacctgggtcaagattgaaaggagggcacttcaagtcccagcgttttggattttatttatttattggagacgagtttcgctcttgttgcccaggctggagtgcagtggcccgatctcggctcactgaaacctccgcctcccgggttcaagcgattgtcctgcctcagcctcctgagtagctgtgattacaggcatgtgccaccaggcccgactaattgtatttttagtagagacggggtttcgccatgttggccaggctggtctcgaactcctgacctcaaataatccgcctgcctcggcctcccaaagtgctgggattacaggtatgagccaccgcgctcggccttctctttctttatgacagaggacaatcccactgctgcagaatgccagcaccagaacccccctttccccctgcagtcacttgtggctcctgcaccctacacagaacactcactgagaactccacagagatccctggactgctgggaattttttggaccaaccaaaaaacgggagtaaaagccacagaactctttccttgtgggcccacctgtcctgagttttactatttttctttttcttttatttatttattcattttgagacagagtctcactcgctgtgttgctcaggctagagtacggtggcaccatcatgactccctgcaacctctgcttcccaggctcaagcagttctcccacctcagcctcctgagtagctgagactgcaggcaccggccaccatacctggttaatttttgtattttttgtagagacggaggttgctaggttgcccaggctggtctcgaactcctaggctcaagtgatcctttctctttggtctccttccttggcctcccaaagtactggaattacaggcgtgagccaccacgcctggctggattcatgatcttaaccttcactgactttaccagattgtccagttttacaggtgaccttagagagtcacattttggccctaacgtgtccttgggcttcggcgtgtgaggtcagagacccagctgcattttgttcctcttggcctagacttaggacacttttagaattgaccccacattgacctggcaaatcttctcaaaccatctgtcacatgggctaatggagcactgagcctctcccccagtatttgccatcctctgtttcactccctacttcacttctaaccccagactcaccagaaggttcaaggtatcttcgagctggctttcttcccttatcagtatgcaagtcccagaccacctcagctcttgctcaaagaccagaactccagaagaaaagcgattcagatggcatgttaattcttactatcagcactctagacctcttagctgaactcaccaactgaatagatttggagagggagggatactggtattactgctaatcacagattagcagagaacatgactgtttacaaattctgttcccttatattgttccattagactggtgtttttcagctgggtgaagtggttcatgcctataaccccagtactttgggaggccaagctaggaaaactgcttcagggcaggagttcaagaccagcgcgagtaacatagagagaccctgtctctacaaaaaattaaaaattgtcgagcatagcggcacacgcctgtagtcctagccactctggaagctgaagtgggagggatcctctgggcctgggaagttgaggcttcagtaagctatgattgcaccactgtgctccagcctgggggacagagtgagaccctgtttccaaaaaaaaaaaaaagaacagtgtttttcaaacagcgggtcatgactcttaatggttatgaaacaaatacttattagatgaaaagaaaatagaatttttaaaaaattgtagtctatcacacataatacagagacagtgtttgttctggttgcaaatgaatgcatgcatgtgtccactgggtagggctatccctgaccatggatgactgtcaaagaaacacagaagctactccattagatcacattcatgatcagagatttttttttttttttttgagatagggtcttactgtgtcatccaggctggagtgcagttgcacatctcggctcactgcagcctccacgtagctgggattaccaccatgtgccaccaagcccagctaatttttgtgtttttagtagagacagggtttcgccatgttggccaggctggtcttgacatcctgacctcaggtgatccgcccacctctgcctctcaaagcactgggattacaggcgtgagccactgcgcccagccagagaggtcctttagctgttatctttgcatgacatttggaagccgaggctaatagacatccaaatgcagcctacttgcaagcaggagttaagtcagtttcactctcgtatcttgtatttgtgcccccagcccttggagcgtaatgagaaggagccggcggcagggagacaggaaccacaggactccactccagctgtggattctaacccagacctcttcccccacatccactaattcttcacagaacctttaaactgggtgtgggctctctgcaagtttcgctgtggtttctaagtccttagtggttgatccacttgacaactaatttttttaagttggtagctccctgcggtatttgacagtttttggtttggttttgtttttgagacagggtctcactctgttggccaggctggagtgcagtggctcatggctcactgcagactccacctcccagactccatcgatcttcccacttcagcctcccaagtagctgggactacagttgcacgccaccacacccagctaatattttatttatttatttattttagagacagggtctttccatgttgtccaggctggttgtgaaatcctgggctcaagtgatccacccaccttagtctcccaaagtgctaggattacaggcatgagcctgctcctggccaccctctggtattttccactgttcctggcacatacctcccttagctcttgttacagtcttttgttataatgttggtttaggcctcaggaaacaatctctctggccttctcttgttctttcacctgccccaaggcaggactttaatcttgcccacctttctgattgtgggtcttaagaccctccccagagagggtcctgccctgtgccctatggaaggaagcttccataaaaatttccattaaaaaaaaaaaaaaaaaaagactgggctaggatagctgaacatgtggaggttcctggagggtgatgcctagggagggcttggaagctctgtgcaagggcccttccccatctcttcatctttatcctttgcaatatcctttataataaaccactaaatggccaggcgtggtggctcatgcctataatcccagcactttgggaggctgttgtatcacctgaggtcaggagttcgagaccagcctggccaacatagtgaaaccccgtctctactaaaaataccaaaattagccgggcttggtggcgggtgcctgtaatcccagctactcggggggctgaggcaggagaatcgcttgaacccgggaggtggaggttgcagtgagctgagatcgcgccatcacactgggggacaagagcgagacttcgtctcaaaaaaattaaaaacaaacaaaatactaaatgtaagtgtttccctaagttctgtgagtggctccaacaaattaatcaaacccaaagagcgggggtcatagaaatcccaagtttaaggtggtcgctcagaacttccagaggcccaggcttgtgactgctgtcacaaatgcagtcttggggactgagccctcagcctgtgagatctgacctcactccagataagagtccaagttggactggatgagaggacccccaggtagtgtctgctgcttggtgtgtggggataaacccccacgcctctgggcagagcagtcttctgtgaagattgttgtgaggtgagagcagaccatagtttgagagtttttcccgaaacattcccccttcagcttccctgctttgcctaataaaaagaattagaaaggttttaagcagaggtaacccaaaatatgtttttcctatgcttataccatggttttattttatttatttatttattttttgagactgagtctcgctctgttgctcaggctggagtgcagtggtgcatgatctcaggctcactgcaacctctgcctcccaggttcaagcgattctcatgtctcggcctcccgagtagctgggattacacgcacgcgctaccacgccctgctaatttttgtatttttagtagagacggggtttcaccatgttgcccaggctggtcttgaactcctgacctcaggtgatctacccacctcagcctcccaaagtgctgggattacaggcgtgagtcaccatgcccggccctataccatggttttaaaatgtcttcaggaaccacctcaaagtttatcaatagcaaacaggttaactatattaggatactttcatacaaggaagcacccacaggcttcaaaagactgaaacagatttctgtattaccaacagaagacaatttccaagctataagtgaaaaaagcagtcagaacggtggtatataatacagaaccatttgtaatcaaaatcaatgtatacatgctactcgtttacaggtgtatattcagtcgctgaacaaatctccgttaggggcactgttcgtgtgctgggaacacacaggtcaatgaagagcagccagaaagccccaagctctggaggcttccactctcgtgaatcagcaccgcttgatcatctgtgaggtagagattgggagccacatttaactctgagaagagaacctttccatactgttatgggttgagtcatgtcccaacaaaagatatgttgaagtcctaagccccagtacctgtgaatggtgaccttatttggaagtggggtctttgcagatgtaatcaagttaacatgagatcattagggtgggacctaatcaaacaggacttgtgtccttacaaaaagagggagatttggacacagaacggaaagatggctacgtgaagatggaagcacagtggagtgatgtggccacaagccaaggaattcctgggagaggctggattctcccccacagccctgaggacaccttgattccagactctggtctctctctggcactgtgagagaacattcccattgtcttaagccacccagtttgtagtcctttgttatggcagcctcaggaagcgagtacatgaagctctgcaagttgtgtttaaaattgcatatgcataggttattttatttatttatttttttttttgagacagagcctcactctgtcgccaggctggagcgcagtggtgcaatctcggctcactgcaacctccgcctcccaggttcaagcaattctcctgcctcagcctcccaagtagctgggactacaggtatgcgccaccacgcccagctgatttttgtatttttagtagagacagggtttcaccatgttggccaggatggtctcaatctcttgacctcgtgatctgcctgcctcggcctcccaaagtgctgggattacaggcgtgagccaccgcacccggccctggttcctttttctaaaacaagtaattctatttcgttacctttatgttctcccagctggttggtggggcagtgggggtgcccagcttccagaaggtgcaagctggagggtctcagaagaaaggcaggactgatgcccaccctgaccctgtgtgctacaggaacaacagacagcccacccgcatctgctagaaggcatgaaggaaggaagggccaaggacgagatgtggagggactcgggtccatggggtaggtattgctgaggccatcagaacaccagacaccaggacatcatctacggcctcccctccaccaaggggagaattgtcagccactgcctgatgtcattcccctccaccaaggccagaatgctgcctcttgccagaggtggggacgggagggacactgaggactgagatgtctggggacaatgctggcttcacgaaagagagatgaggccaggtgcggtgactcacgcctgtaatcccagcactttgggaggctgaggcaggcagatcacgaggtcaggagttcgagaccagcctggcctatatggtgaaactccgtctctattaaaatatgaaaattagccgggcgtgatggcatgcacctgtagtcccagcaacttgggaggctgaggcagaagaatcacttgaacctgggaggcagaggttgcagtgagtcgagattgcgccattgcaccccagcctgggcaacaagagagaaacttggtcccaaaaaaaaaaaaaaaaaaaaaaaggagatgaggtttagctgggcatgccagccttcacttgcccaatcactgtgtgagtgatttgtacgccctgagaccaagcgaaaggtatgatctagaggtagcagcttttctagaagccagcctctgacccctcccacccagaaggagtaggctgaacagtggttagacaggcctttaattcagggttcttcaaaaagtgaataaatagaagacagaggactcagcagctctgccagggagcaagcctcctggacttgctaattttgcagcatagaccttgcagagagggtggagcctggtgaagaaggggtgttaatccccgcaagaggctgcaaagcgaactgctcacacaggcttggattggggcattgtcttgctttgaaaacccccagattttattttgctaaagcttgcaatttcttctgtgtgtaaatgacacttaaaatctgtttgtaatggaacttgattgtatccagctgtcaccaactgttccctgtgccacccaaaagacagctggccacgtgccacggtttgggcgttcacttcaaatagaggagctagtgctctagttcctgctagacttcaccaaaatgttttcacttacgcagaaaaacaaagggggtgcgggtagggctcagggaaggcaatgtgaaggggaattagtgcagtgtggactgcggagccactgactttgatggacggtgggctggctgttttctgagcagggtccgaatgcagtcacaaagtatgctgccttcagcagctgctccagttcactcattcaacaaatatttaccgggtggctggtaagtgctaggccttgccaagagaactgtagccacataagacagaaaaatggcagaataataccttttttttttttttgagacgaagtctcgctctgtcatccaggctggagtgcaatagcgcgatctcagctcactgcaacctcggctttccaggttcaagtgactcctctgcctcagcctccctgaatagctgggattacaggcacccaccaccacgcctggctaatttttgtatttttagtggagatatggtttctttttctttttctttttttttaaagacagagtctcactctgtcacccaggctggagcacaatggcgcggtctcagctcactgcaacctccacctcctgggttcaagtgattctcctgcctcagcctcccgagtagctgggactacaggcgtgtgccacgaggcccggctaatttttttttatttttagtagagacagggtttcactatgttagccaggctggttttgaactcctgaccttgtgatctgtctgccgtggcctcccaaagagctgggactacaggtacaagccaccatgcctggccttttttggctggtctcgacatcttgggctcaagcaatcctctcatctcagcctcctgaagtgctggaattacaagcatgagccactgcgcccggccaacacattcattttaaaatggccttaaaaaaatcactggtttatgtaaaagaacttgaatttcctacacacatttcgcagcaagtatttgccatgtacttagactgtgtgttgaaatctggtctcatgatggtaagaagctacctaaatacctagatcctgcttaagggagtggcaatcttgtgacctgtttctcactcaatgtctaatggatatttggcagccatgtcctgttgcttcctctaatcaacaccctcctaaatgaagcagtaagggagaaaaccaatgaaaacacgcatgcaagacatgtatcgtgagagtgacagctgacaatcatgataatttgaatctaacctttgcattttagaggagaaaagcaaattcatgatgctaactcatggcagaccccttagaacacaggtcttgattcccaatctggccttctttttttttttttttttttttttagctggagtttcgctgttgttgcccaggctggaatgcaatggtgcgatctcggctcaccgcaacctccacctcccgggttcaagcgattctcctgcctcaccctcccaagtagctgggattacaggcatgcaccaccatgcccggctgattttgtatttttagtagagacggggtttctccatgttgtgtcctgacctcaggtgatccgccccgcctaggcctcccaaagtgctgggattacaggcatgagccaccgtgcccggccctggccttctttttataggaagtcatgattcaaacctgactccagcctgaccctactttaatccctttaaagcagcaaaaatatacagcagtttccccttgagaaagcaacttgaagcaacagtttggtacagattctgctaagaacaagcacatttttaatctcaggcccctctcacagggcaatttcctcaatgcctggagtgctttctgagatcccagaacaacgggctggacagctgcccagaggcctctagggggctgtggaaggctgaagaggcaggggggatctggatcacaaaatagaggagactattttctctgaacaggagtgagaaaccttatgttggggaatgattagattctggtttcttgccttaaaagattgtcctggaggccaggcacagtggctcacacctgtaatcccaatgctttgggaggccaaggcgagaagattatttgaggccaggatcctatactgagggggcacctctttcagtgtctacagtagagatcctgacagagggtggatcggtcggctgttcagtgggatgtattgactggatcagttgattctgggcttgatctagagtatgcagcaaatgcaacaggctcacatcttagaggagctctccagggtgcggaggtcaacagtgtcaaatcctgggaagaagtcggtggcaagagtgggaattaggtcactgagaagtgatgatggcagaagctagactaagaaccacagagagtcaacacagagcaaaatgaatgtcaaccaaaggagagggcagctgagaggggacacaaggacacacaggctttttaggatgggagatgcctgaacatgttcctaagggaagagtgagacacgggagcagacagggtaattaatggagcaaggtccccagggtggaagaagttggcctcaagggcacaggtggggtgccagcatacacagagggggcacctcgtccagcatctccagtagaggtccccacagaggatggggaacagcccctatactacagttccttcccactctcccacaccaaccacccagcccctctgggaggcatcagatcagaacagtgggtctgcccagcagcagccccggggactattggacatgcacattctcaggcctcatcccagacctgctgaatcagaatgcgggggaaggagcccggcaactggtgttttaaggagcccctggcaattctggtgctcacttgagtttgagaccagggaccaggatggcaactctcaactctgctgctcactatgatccccccgggaaggttttttttgttgtcgttgtttttgagacagagtctcactctgtcgcccaggctggagtgcagtggcatgatcttggctcactgcaacctccacctcccaggttcaagcagttctcctgcctcagcctcccaagtagttgggattacaggcacaggccaagcccagctaatttttgtatttttagtagagacagggtttcaccatgttggtcaggctggtctcgaacttctgacctcaagtgatccgcccgcctcagcctcccaaagtgctgggattacaggtgtgagccaccgcgcccgcccccctcacccccccaggaaggctttaaatgctgatgcctaagcctcacccatagattctgattctacttccgtcagtatcgaatgcctctccccaggtgctcctgctgccctatgagcattgagaaccctgaggtaagaaggagaagagaacagagggagaggagctggttttagctttggtttccccatgttgtttaattttggggtgggatgggaattcttgaggtagccttggaagtcacttaccaagagtagtgggcacatatgcaatgagagagcaaaatagtgtgcagggatcactgaaaagaatgggagagagaggaaggagttgcctgaagaccaagggcagaaatcccaaaaggcaggcagagcccaacgaagaagggcagccagacagccctgaaagccgaatccatggcacccagatgatcttctccaagggtcatccccagtccagatatggaaggagcagggggccaagccaaggcgggatctgcacgaagcagcagcagggccacctccgggcaagagtgtgactccagggagtcagctcagctgacaagacacagaaagctgcccgtctgcatgtcacgtgacctgtccacacacagtcctcctttaccaccacgtccttggcgtacccacatcctcattgcgctgaggttgtccaagctaccaagacttgaggcagggattctcacagcaccgtccagtgttaaactgcccttaaggtcactattacagttatgatgagccctaacagtatgttagggataaacagatgcccacctgattccccagtgtccagacacctgggctttttcctaactagaagactcggagttcacccactgcctacttcccatgcctaggattctccctgggttccctgtactggtaagatgccaacacgtccactaagtcagattgaatctctcaccacctgaaggccttcctgaaaccatcggtgagccgcttgcttccctggctactacttggcctccgaacccaactaaccaccctagcagaaatcatcttaaactccacccagaacattccaccctatctgtcatctcacctcttgagtccatctcctaaatatccaagtgacctcacttctagcctatgctactaatgccaatctcttagctctagccttggccacttctcagccaacctggcggctggtcatgctcacctgctgttctctgcactccaccagccgcctttcaggccatcaggcagcctggaatccactatcagcctcaggagtctaaaaagcacatcagaccttggtaacccttcttgtccaaactgtcaaacaaaacctgccctgcgcttttgcacctgacttacagttagccagctgagtcctgctggccagctcccactgccagccccctttcagaatgtcacctcaccccacggtgcttcaggcagagctcatgacaggctcctcatggcctccctgcatctccctaacagcactcaccctgccctggagccgtcagtcctgccggtgggactctgcccgccgcctgcgagacgacgtgagtgtgttcacttttatacacacccagaagtggccctagtgtttgggaaacggcagttaagaatggaaaagcctgtcaggcgcggtggctcacacttggaatcccagcactttgggaggccaagacgggcagatcacgaggtcaagagatggagatcagccaggcgcagtggctcacgcctggaatcccagcactttgggaggctgaggcaagcggatcacaaggtcaggagttaagagaccagcctggccaacatggtggaaccccatctctactaaaaatacaaaaattagtcaggcgtggtgatgcgtgcctgtactcccagcttcttgggaggctgaggcaggagaattgcttgaacccgggaggcagaggttgcagtgagcggagaatcgtgccactgcactccagcctgggcgacagagggagactctgttcgggaaaaaaaaaaaaaaaaaaaagtaaaaaccacagcctcgcccatgtcgccactgcacccagcgttggtgtcagatcaccacctctccaagcctcagaaccccctcaaccgctgcccaggctacaacgcaaatgccttcagacacagcctggctggcaggaaggcctctgggtcagcagtgtgccctgctctctgccacccctttggtttggatgcaggagctgcctcacctcgcttgttcttacttggctgtcctcattttggggtgtccagccaaacccctaaagagaagcgaagacatgatgccctgtgtttggtggataccgtggggtggagaaagcttacttccaagttgctaaagggagatgcggggagccacacacatcaggtaacagctgcagagcagcattctcaacaggagccgctgcacggcaacccgcctgcgccccggggttcattcagcctcttggtcacctattcactagggctgctctcataacctcctggtcactgagctccctgcagggacctacctgcccctcctagcccagcctcaacttccaggacaggtggaatcagcgagactgtggttgggatgtactttaaaaaaaaaaaatcaaatgaaaccaacaaagacacagaactcacaaaaccggagtattttattgcaccaagatcttggcaacacgtggggctccccaggcccccggaaaggaggtgcagaggatgggacacagacctctgcacacacacaggtgcggccatgcaaccaggacgcggggcaggcaagtgagaggacctgggagaggtagctgctgtacacaggccccactccctccagctccattcccaagcacaaaattcaacagacccagatcctaagtcaaccaagtgactgctatgacaaaggcttgggttattgacatttacttacatacgtgtacaagacctagagtttgaactcgttttctgggcctcatctttcccttccctatctggttgatgacttcggtggagggaagggacgtgactccacccaacagtgataaacgctgcagaaagtcatctcgtgctcaccactgcccaagagttaacgaatgtatgtaccccaggaaaaggttttacagttatctagtggagaagggaagagactgatttggaggagagaagggagagaaaggaacgagataaattctgtgccagcagacaactaacattttcaactacagaacatcacacggtaaacatggcagagggaacagttcacacaggaatgcaagtcaacaccccgagaagaaaaggaacataccctgcccgtgaaggcatgtgctttcccttccagataagttacaaagccagagcacggaagccaggccctcatctttgaacattcagagactggtccgcaggagagggcaccctgagcagctccactcactgctgctgggacacaggtggccacaggagcttgattctctcccacccttctaagaagagaaacgtaaaaacagaagaaaatccaaaaagagacacccacccacatggaaaaaaataaatgtatcttcccatattaaaaaagcaattccatctacacgccagtaaccacccaggccccgagcacaggggcaggaagcaaagctgccccagggagagggggtgcagacagcgaggcagccacccgggacagcaggatgcctctggcccagcagagccacactgaaggaggtctaagtccaacaccacgttgtccatctccacctgcgacgactccgggaggaaatgacggggacagacccgatgaggaaggatgttcacggtcaccttcacacttcccactactatgagggcatttgtctttttcctgaaaatatcaccttctctgaggatttcctgtatttattaagttacaagttggcaggcacagcttgagcaacatagaaaagtaatcttcttgagttatacaatcatttaaattccaaagcactcacaaaattgagcaaacaaagccactatttgcatatttgggaaaggaaacatattgctaatggaagccacaggactggtcaaaaataaatgttttgtattaagtagtaaaataaatggagaattctaccccaaagcctccacctcagtgaagacctgcgggttattgcagctgcaagggaagctacagcacagtcgtctcagaataaacagcagcctggaaagcagatgtattcgcaggtatcgagggctcctccgaccccaaatagcctctgctctccaggacagttgagagctactcacaaggaaggggtgcacagtagggccaccctctcgagttccataaaagggagaggtggctgggtggggtcacctcttcctttctgaggacaggtaaggccaacagatgaaggggtcccgctgaggaagcaggggagggcgggctcggacacaacggtggcgtcagccccgagaagcaagggatggcttgcccagagccaccagctatgcaccgggagaccacctgggggacatgtggccaccatcccccactctcctgatagccccaaccaggggcagcagcctctgccagcacagaccactgtctatgaaacatgagaaggcacagcctggcaaagatgtccagcaggtgtgcggccacctctgctcacacacacactgtcgtttctcttgcagggctggtcgggaatgtcaccaaagaggttccgatctagagaagcctcaaagcctctgtgttgggcggtctgtggacactggtaccgggagagctcctaccgtgacaggctcccagcgcagcagagcccacacagagagctccctcagatccagaccgacagctcccgggaagggacgccttgtctccaggaggctgcagaacaaaccacggtagtcctgacagagagaaacgagacccgaatcttcccactgccaccctcgggtatgagtccaacctaggaacccaatgcatggcatctcgatgcggctggcaagaagtcacccttctgcaagtgactgggacacatgccagatatacacacaacccacatcccacacacaccccacacatgcccttctccaagtgaccagaacacatgccacagatgccaggtgtacacaccccacacccaacacacactacacacacccccttatacacacgcatcccacacacacccccttatacacacgcatcccacacacacccttctccaagtgactaggacacacaccacagacgcgcccacaccacacacaccacccaacacacatgtgccagatacacagcccacatacatcatacacacacgccacaccccaccacacccctacacacatacacggcacacacacccccacctcacccttacacccaccccctcggaaccgacctccttccacaggggcacagtcagcggcgatagctgaggctggcagcctttgctgggtgagtcacagaccagaagttccgtcgagtctgaagtttctggaaggcgttgaagtttctcctcttctctctcttaaattttttaattttcttttcctagaccaagaatcacaggcatcacagttcccaaaaacggctctttcctggcccacggggctccatgctgcatgcaggtcctgcacacaggccgggctctcatgagctctctggagacccactcttcacaatgacccctgtgcacggcgacctgcagtccccctattgacaaaggggcggaagctgcgaggatgcatgccctgtccatggccacacgcccggacaggcctgggcagcctggctcttctcatgctcggccgcttcatgccactgccgccacctccaactgccccggctctgagctgagccacgccgccctgctccctcaagcctgtggtcagcatcacacatcataccttccctcggtcaaactcttcgtcccagtcatcaaccacggtctcagtccgggcctgtctgctgtcttcaatagcatcctgactgaccgccgacatcttgccatcccaggtcagaactaccaggcagacacgggggtcagcacgagtgcaggttcccaggtcccctgtggcttcacttcaagagtgtcatttaccaactagtctactcataattagtcaacaattttgagtgccaccttgtggtgaagagaaggacaagaggaggacggctcgacgcccatgtgtggtcggtcagcatggaacccccagcgatgccctcttagctaaaccctaaaccacagccaaagagttcagttctttctaaacccatgccctcgtctgaggaacaaagatgtcatgtttggtctcgaagtctgaataaaaacatgctctgagcaagaagtgacattacccaggttggaagagcttcgtcactctgccccttccctacccaagacacagcatgtgtggggctcctcaccctgccccaaccctcagaagcagctgttctggatcctgccacggacagaagccaccttcgtgccacggctgagggtttaaagaggactccagccagtgttgagattcctcttcccattctcaaagccgagcgatgcccgcccgccacactcacagtgcaccaggatccattccacacccttccctcctacaaaaccaaccaatgaaaggcaaacagaagtcctgtctccaaatcagtaccttttctcccgtaagctttatcagatgagtatttgagcagttcctggaccacatcagactcccgctctccattccaagacacaggaggggcctggctcagccctgcaatcggagcagccaagaaacatttacagacgtttaaaataacccactggggaagcaatcgcacaccttaaattataaaacaacttacagtaagtggatgcttgccttttttttttttttttttttttttttttaaagacagggtctcactatgtttcctaggttggtctcaaactccttgggactcccactggcctcccaaggtgctgggattacaggcatgagccatggcgcccagcctaaatgcttatttactaatgcttacatgcttaatttactaatgacctgacacaatagagaaggctgttgtccaagtcaattcatgagaaagaaaacatggaaaataacaaaaagctaaaaaccaaaaaaaaaaaaaccctccaaaacccctttaaccagtagtgttaagtcctcagtctgacagaaggagagaagagaactagatctaaatggaatccacctcacctacgggagaggcccatgccccaggaccagcctgacacctggatggccacaggggtggagggaacggccaagcttggctgctgccatcaggggcccgacctcctaagccctgtccagggggaacctggtccccatcagcaacaccgcacaggtccacccagcacctcgggaccaggacagcactcaccaccctcatcgggttctagaaaccctttctgaactcgtcctctgcccagctagccacatagcccctggaatatactcacctcccttcacacaaatctgacctcatttctccctgcctccaattcctcagtgagctccaggctaagtgtcccctgcccccacacagtggcttccatggttcccatctcatccacacagcccagggacccggccatgcagagcagcctgcctgctcccaacgtgctgcgcctcctgcccttgggtctggtgccctgcccatttagccactctcctcaggtgcacaggactgcaagagcccatgcggcccccagcgcctccttgctgagcatgagcccttactgtgtggttctggctctgccagggagccccgagggcccagggcgcacttcagtagacacaaccagcacctggcatggaccctggcgcaccgcaagtgctcaagtgatgtcccttgcactaacaagccaactccacttcgctccgagggtggcacggagcacagctctggtgccatgttagggcagtatttttttttttttttttttttttttgagacggagtctcactctgtcacccaggctggagtgcagtggcgcaatctcggctcactgcaagctccgcctcctgggttcacaccattctcctgcctcagcctcccgagtagctgggactagaggcgcccgccaccatgcctggctaactttttgtatttttagtagagacggggtttcaccgtgtcagccaggatggtctcgatctcctaaccttgtgatccgcccgcctcggcctcccaaagtgttgggattacaggcgtgagccaccacccccggccagggcagtacttctgagagcatgctggccagcaaactcagtcggcactagctagcacccacgttttgctatttatttcataccatttcatttttaacgataaattcctttcttaagagttggataaatacaaatcagtctctaaggtcctgctgacccccagatgcactgccataatcagaccttccagactgcagaggaggcctcactcaagctcggccccctataccaagcagccaggactttctctccccttcacttaacaaatgtgttctgtggcgggtgcctgccaaggcatgccccagccagccctaaagaaaacaaaacaccctccgattgaggggtggtgcccaaggacagccacagcacacaggtccccaacagcaagcaaaccgtgctatgttctgaatggcccagctacatagagggagaggaggattcacttttgaacccaactcttctaaattcaaccatcacagaaaaaaactcaggctgggagttcagggagtcattccgtgagaagctgtagacagaacagctttgaatcggaagacccactggcattcacagaatgttttaaagttcatgtgcactgtaacctctctcatggggctgtttcagtcaaatgctgtgacacatgaggaagcttcaaccccatcacccaagggagcagactcgggggtggggggtgaaggttggtagggtcccagggccctccacatcttctcccagaccctcccaagctcagatgcagtagacgctgctctcagcctgtgcactccccaataccccctcacccggtgcacacccacgcggtcccccacccccttgcccggtgcacacccacgcggtcccccaacccctcgcctggtgcacacccacgcggtcccccaccccctcgcccggtgcacacccacgcggtccaacccctcgcccagtgcacgcccatgcggtcccccaacccctcgcccggtgcacacccatgcggtcccccaacccctcgcccggtgcacacccatgcggttcccaccccctcgcccggtgcatacccatgcggtccccaggacaccagccattcgcggatggtgcgcagctgctggactcggggacaacagcatcttggggcttggcactccttgggcatttgagatgcccatcctcttctactgcccgctgtgtctcctgctttctttttttctttttctttttccttggagactcttccatggcctctggatcaccatcacccatgggagagcagctgcttggaagtgagaggcagcagtcagctctgagcaaattggaaggggagcaggagcgcacagacacccgcctgcaacatggagaaggtgccaccccagctgtgacccagtgcacgcaggtccctgcaacattcttccccccacacgcattagcggacgctccacacgcagccacggagacagtagagggaaaaccagtcgcgtttcccatcctaactgagccaagcctgttgacgccaatgtgcaggctactgtgacctgatgaaacggcagatcctggcctggcccgggacacctgatccagcatccttgaacggccctgcacatacaatgatggacactactgtccacaccactgtcgcttcaaggatcaatccactggtatttatcagaggagatattttttcttttttctttttttttagacagggtttagctgtcacccaggctgtagtgcagtgacgcgatctcagctcactgcaacctccacctcctgggctcaaaccatcctcccacctcagcctcctgagtagctgggactataggtgcatgccaccatgcccaaccaatttttgtttttggtagagaaagggcttttccatattgcctaggctggtctcaaactcctgggttgaagtgatccacccgcctcagcctcccaaagtgctaggattacaggtgtgagccaccacacccagccagaggagacatctgatcacaaatccacattttagaaaaccacgcaagcagactacgtttccagaccatacctacttgggggtagattctgtggttttgctttgtttctcgtcagaggtagacagatgccactttgctcctgcccttacctgtgccgaagtgggtcctggtgcaggccgccttcttcaccaagaccttctgctcctttcctcctccgcttcctgctgctcgcgtggtggccgtccgtaacacatcccacctgctggccattcacctgtggctgtgtgccatcttcctgccgtctgacagcgggcagctgtgcctggccctccctcctgtacatggggctcccaggctgtctctgtgtctgcccctcctgcagggcgctggcagctgtgtcctccgggcgcttcttcttcttcctcttcctcttcccgtggggagccgcagtggcctccctgatgtgctgtgggaggcgcgtctctgagcccagcctctgcggctctcccacaaaggtctttttcctcttctcagaggggctctgggggggctcactggcctctggcaactggtgtggaagagacacaaggtcctcgttgacctgaggcagcgccgtcgagatggaggagcagctccgtggttctgacgtccctgggggcttgggggtactggacagcaatgtggggtgggggctgaaggggggttgcaggcggctggatgattggggagcaggtgacacagccctgtggggacagccaggaaacagggagaggatgttctgaaagacccagcagagctgttccttctgtctaccctcactcccctccctttcacctaaaaatctgaaaaggcttttaccctgtagttttcagatacacattaagttacatgtatgtttgaaagaaagctaacaattaattcaacatctatttaaatgcaaagttggccaggtacagtggctcatgcctataattccagcactttgggaagccaaggtggctggatcacctgaggtcagaagtttgagaccagcctagccaacatggtgaaaccccatctctactaaaaatacaaaattagccgggcgtggtggcacacgcctgtaatctcagctagtcaggagactgaggcaggagaatcgcttgaacctgggaggtggaggttgcagtgagccgaatcgcgccactgcactccagcctgggcgacaaagcaagactccgtctcaaaaaaaaaaaaaaccaaaaaaacaaaaacaaaaacaaaaaaaaaaaaacaaagttacctaggtggtgggttgataggtgcagcaaaccaccatggcacctctgtaacaaacctttacatcctgcacatgtaccctggaacttaaaataactgatccctgagatttaaaaaaaaaaaaaaaaaaaaaaaaaaaagcaagccaacacgtgattttaaaagtcaaaaaaaaaatttttttttttttaaaaggcaaagttaataagaattgttccatgccttagtttcttgtcaccaagcaattcaagtatttttgcgagctctaatgtaaaaacatctttaatacaaatgtgttaagggaggaaaccttcacgaaacaataaatggtaaggaaaaaaaagatcccgtgaggatttattttccaacctccgaaagtctcagggtgttcccgggcaggaaatgagcctcataaggaaagcaagtgttgagctggcctaatgacacctccacattaccgtcattaggacgctgaaaccgggacacagatgcgtagagcagaatcatgagcaaggcgtgtccgggacaggatctagtgccgaacccagtgaggctccctcttgccagctatgtgtctctaggaaaattaacttcccactctgaaccaccatgttctcatttgtcaatgagctgggaccacaaagcccacctcccagggttcctgcagaaaacaggacccccgtcatcatctaaacaaactataagggccatgccagctgcacgatgtttgattactctaagtgtcttctggaatcttttccaaaaaagcttataaggcaagaaacgaaaaacacccaaacacttaaggccctcccacgtacacaaatcttatgctaggtatagggcagaggtgtgcttgtgtgtgtatatgtgagaggagagtaaggcagaggctgtgggcgacgcacagtcatacctcgccctcatgtagcactggagattctagaactagaacccagcgccgaggccaccagtacagtccccgcaggccgcctcatgactcaccccatctttcactgcttccgtccccactcccagcggcttccagacagccatttaccagttactctcaacttcctgccactcgaggcacctaagagacgcaggcagcccctgcggaccagggcccacatgcacagggaaggggctgcatctctggcaggtgtctgcagaggaacccgagagccctgagacagttcttaacctgcatgacgctagcaggcaagacgtcccacaaaaaacgctcgggactccgagctcactcaagcctctcgccaaggcctcacttcgcctttctcttcgactgggaagtactgtcatggggctggtagggatacaggacaggtcagtccccagcacaccacatcaccacaaggatgtcgcagacagaccaccaacaaagacagaactaagacatcaggactgcagaggccgaactgccttcaccacccaaagctcctttaccacaggggaacacagaagagggggatcttggtcagtgacgcccccctgtacctcctggctgccccaatgctttgtctgtcctgtgaggttggcgattcgtccaactcctcaccagccaagcacacgcaaccacagggagaaccagttggcacccagaagatcccggcccaaagcttacctggctctatggacgggccaagtggaggcaacgacggggtgagaggttttcatggggtgggtgaggtcggaggatggtgaggggggaggtggacggaggtcattgccggtcgccctccacagggtgctggcctgcagttatcgacataaataaaaacttggtggtctaaaaaaggtttccgtgagtgaagagggaaaacaaaagtaacaaaaaatgaaaataaaaacaaaagagcccagaaaaaaagatgaggagacagaagaagacaaaaaggggaggtgaggggcaggggaatggtagaagaagaaccagaaaagtatttttggttagaaacaaaaaaaaggaagaaaatttaaacaaaaatctcagcacaacaatcacatccacgtgccgtggctgcccaagcttcctgctgcagaggtgccgggcaccccactggggctctgcgcttcctgcccgccccacccctgctagggacacgtgctggtggggcccaccctccctcgggttcagtcaggatcttccacctactgtgaaaacagggaactgctaccttgcccaaacctccatgagtcacatgagcatcaccagatcagggctctctcaacaccccatactgccttcaccccaagatagccgttctttaattgcaaatggctgggaacgactaaaagacactttgttcctctaacatgagggaggccaaagcccccggacaatgttctcactcccttcaaaccacaaccaagcaactcttggagctctcctgatacacagcagcggcgagacccccacacacccaccttcttggcagaaagggccagttttttggctggtggaggagacatggtgcttgcaggctcagtggtggtgttgctcaggacaggggacttcagcttcaccgtcttagaatctgctccacttggcggcgttttggagtggccagcggtggaacagttcgtttcctgagaatcgcagagatgggccgctccactcctgggggtctggggggccttggtggagtcgctgctggccgagtgctctgggctggagctgctggagcccctcctgtcgaggccagcgctctcgtcgttccccttcagcccatgcccgttggcagtggctgtagccaggagcttaggtgaggtagagaggacaacatccctgctgtcccaggagccctgcctttggctcccagatctgctgctattcgagttgctggtcccaggcagcccctgagcagttctgggggaaaagtgctgtggaggagctggcttcttcaccttctttccagggtcgtctaggatggttggcatgtgtgtgggtgtctgggagagtttgggggaaggggaccccgagggcagctttggaggaatgcagccgttctgggacttcaggcccagggtggagccattcctggatatgggcacaccaatctcttcagtggtgtgcggcttcttcatcgtcccagagtcttgtcgctaaggagaccaaagcagaaaacacaactgaggaagcgagaagtctcagctgggccacatcttcttaaggccacagtgaatcttagtagcaggcatggcctctgattagcatgctcaagataaattatttatctggactcttggtaaagacactgtggcttctctgaacaattctggtgttctgtgacatcccaagaacagggaccacagccgtgtaccaccacacctggctaatttctgtatttttgacagagatggggtttcaccatgttggccaggctggtctcaaacttctggcctcgagcagtccacctgcctcagcctccagaagtgttgggattacaggtgtgagccatagcacctggcctgaatacatatctttatggccacctttactataaaaccagtacattttcatcaagatttgggaagagaaaaaagtataaaggaagaaatttagcaaagttccatcacctaaacataaccatgcattaacattctagtgctttcttttttcaatcttttcttccaaatggttctggcctgaagagttgcatcccagttttatcttaaagctattatctcaagcatttttatgggcgataactctcaataaatatctttaagacagagccttgctctgttgcccaggctggagtgcagtggcatgatgatgtcatcataactcactgcagcctcaaccttctgggctcaagagatcctcccacttcagctgcccaactggctaggactataggagtagaccaccacacccgaataattattactattttgtagagatggggatcttgctatgttgccccggctagccttgaattcctgagctcaagcaatcctcccaccctggcctctcaaagtgctgggattacaggcctgagcaactgcaccctgcctgtcggcctgtctttgacattttactatatatactatgtactactgatacacattaactgtatggttaatttatataagctatattgtctccaactgttgaaattaaaaatactgtacagtatatgtgtgtgtatcctttacccttcagagcacttattacaactgcatagaaataacttattattctgtatttagatgctgaatgtcagccttcccctgcttgaccaagaggctgtacccgttatctctctcgttcccactgcagccctcaccagcaactcaagggtctggtatagagtcggtgcttaaaaaatatttgttgagcttttcctgtacttagtactccatgctaattttctggaaatggaattacaaggctaattttctggaaatgaaattacagatttcattttcatgaaatctgatgcaaaatgccaaactgcttttactatactccagccacatctatttttcaaaacatttgctaatttgacactcgtttgggctattaccactttaacattcatattctctgcacatgcactaaagtgatcttcatttgaatgagatcttttgtttacaaatgttaaccttttgttgacaatattttacaaggttttattgcttcatttgtttgtagtaaattatgtacaaaaatgtaaatcttagtcaattcataattcttctacattttatccttcaactttaagcatacaaagtcttcttcccttcccagaggttaagaatttacctctattttcttccaagttttgttttgttccctacattctattctttgttaatactgttttctaaaaggaattcatctttccactgcaccgcaaagccgtttcactggctgaacatttccatacacactagaacttgcaccatgtcatttagagtaaaacggctcgtctgcttgcagtgtatttggaaaatcacgtttgtaatgaaaatgctcatggtcagtgaagcgcccctgcaggtgtgcctgacacagggactctccttgagccaatctccaccctcgggcatcactctgcccatggagttcctgtggcaagtggggcttcctttgtttttctggggttttttgagacagggtctcattctgttgtccaggctggagcgcagtggcacaatgatagctcaatgcagccttgtgtttaagtgatcctcctgcctcaacctccaaacagctgggacaacagacgtgcaccaccacacctggctaatttttgcactttttttggagatggggttttggagatgggggtctttctatgttgcccaggctgcttcctttttttgagatggagtcccgctctgtcacccaggctggagtgcagtggcacaatctcagctcactgcaacctccacctcccgggttcaagcgattctcctacctcggcctctcgaatagctgggattacaggcgcacgccaccatgcccagctaacttttgtatttttagtagagacagggtctcaccatattggcaagctggtctcaaactcctgacctcaaatggtccacccacctcagcctcccaaagtgcccggcccccctcttcttttttttgtagacaaggtctcactctgtcaccttgcctggaattcaccagcgtgatcatggctcactgcatacagcctcaacctcccgggttcaagtgatcctcccccaacagcttactgaatattctctgtgctgatgggatctatgttgcccaggctactttttaaatttgttttgagacagggtcttgctctgttgcccaggctggtgtggagtggtatgatcatgactcactccagccttaatctccctggctcaagtgatcctcccacctcagcctcctgagtagctgggaatacaggcacgtgccattaaacctggctagcttttgcatttttagtagagacagggttttgcccaggttggtctcgaactcctgggatccactgatcttcccacatcggcttcccaaagtgttggaattacagacatgagtcacagtcccaggcccaggctgcttcctaacttcctagtctgggctacagtgaccaccaactttgcaattatatcatgtattttactgccacttcaattctaatgcttctaatttcagcttctattttctttaatgtgaagagaaatacagatgtacgtaaatgaccaaaacccctgcagactgtgaaaggccctgactgcctgtgtgtggggttcaactcttcattctaaagggagaggaagacgatccatcaaaaacagtcatccaggccgggcacggtggctcatgcctgtatcccaggactctgggaggtcaagctgagcgaatcacttgaggtcaggagttccagaccagcctggccaacatggtgaaaccccatctctactaaaactacaaaaattagccgggagtgctggcgggcacctgtaattacagctactcaggaggcagaggcaggagaatcgcttgaacccaagaggcggaggctgcatagtggcagaggctgcagtgagctgagatggcgccactgcactccagcctcagtgacagagcgagactctgtctcaaaaaaaaaaaaaaaaaaaaaaaaagaaacagtcatcaagagggtccaccccacttcaaatgatcactgtgttctaatgaggaaactgctcatgaatccacttagtgaaactgaattcttaacagttctagcagaaaatttcaaatacacacaaaggtaacttagagggtagttcctaatggttaacctgtaaccacataacctttatcatcctctctctgtatgtatatgtacgtgtgtatatatgtatgactatgtacgtatgcatatacacatatttctatttctgatccatttgagtaaattgcagacatgatgttcttttaccccaaaatatgtccatgtgtatttccaaagaacaaagacactctcttacataaccacagcagaattacccaaatcaggaaattaacattggtacaaactactcacattttccccgttaaatgtgagaacaggccgggcacagtggctcacgtctgtaatcccagcactttgggaggctgaggcgggtggatcaggaggtcagcagatagagaccatcctggctaataaagtgaaaccccgtctccactaaaaataaaaaaattagccatgcatggtggcacacgcctgtagtcccagctactcgggaggctgaggcaggagaatcgcttgaacctgggaggtggaggttgcagcgagccaaggttgcgccactgcactccagcctgggcgacagaatgagactccgtctcaaagaaaaaaaaaaaaggatattttttcctacacgcttacggttaagagtttgcttggtgcctgtaatcctggcactctgagaggccaagacaggagaattgcttgggctgaggagcttaagaccagccagggcaacatagtgagaccctgtctctacacaaaatttaaaaattagctgggtgtggtagtgcactgatagtcccgaatactagggatgctggggcaggagggtggcttgaatccaggagctcaagcctgccctgaaccatgattgtgccactgtactccagtctgggtaacagagtgagaccctgtctccaaaaaaaaaagtttgcttggcattataaaggaaataaaaggagtgcacacagaaagtttgcttggcacacctgtcacgacacctgtaagtggtgctggtctcatgagtagaacagatctgtgaatgacaattctaatttgttgggtcagaattttctcattcatgtctcctctttctctatagccaatgtcagctgatgaccagtttaagaaataacattggccgggcgcggtggctcatgcctgtaatcccagcactttgggaggccgaggcgggcagatcctgaggtcaggagatcgaaagcatcctggctaacacggtgaaaccccgtctctactaaaaatacaaaaaaaattagccgggcgtggttcgggcacctataatcccagctactagggaggctgaggcaggagaatggcgggaacccgggaggcagagcttgcagtgagccgagattggagatcgcaccactgcaccccagcctggatgacagagcgagactctgtctcgaaaaaaaaaaaaaaaaaaaaagaaaagaaaagaaataacatcaactagaatagtgcaaactgcctgcaaattccttccactgtggccaacttcccaagtgtgaggaggtctgtgaggagcaccaagaccagccactttggcctccatcattctcacaaatacctttccagtcagtggggaggaaataatcccattgccgatgttcttcttggagtgatctggaatcacactcgggcggccgggaagggaggaggagcctgtcctggagatgaggccctcgggacttttcttagagcctggaattctgtcaaaggaagaaaacaagtagggaattctcttactaggcattacagaaacggagagaattagaataagttaaggcggggcaaaggcagaaacacggcctggggaaaccctgccagtcctaaccacttctctggaatctccctttgcctttcaaccacagtgaggctgagagatcagccccaagtatctgctgaatataagcagagcaagggcaaattagagtcagaattcctccaagatcagagttcaatgcaccagaaagcaagaacctcaaacacctcagccacactctgcagagacgtacaaagcagcaaaaatgcctcagctgccacggtctccagcctccaggtcagtgacagccagctccaggagaaggcccctccagagaagctctgcagcagcacccccacaaacacgtccttcccagcatatccctacaggggcagcttccccacacgggaaggggcattggctggctaccatccagggagcagtacctctaatttggggcaatactataaatggtgactttcctgtttacattcaaaacagcatcaatgtgagggcagatgggatcctgtcctgaccttcccaaggctctggctttactaaaaagtgtccttccctgtggacggtctctatgacacatgacaaatccctccagtggaattcccaattaccttcaaacaaaaaaaggttagggaggcccaccggtataagaaaagagcagagggagtgagctcatctggggagggcgtgagtttattaccgcagatagaacagcacgtaggcctgctggttcagaaccaccttgacgttgctggaatggaccaaggaatcattcatctggtaccactgtccattgcttgcctgaagcagccaaggatgttgcagaaaacaaaacaatcaacaagcatcccattatcctcactttttaaaaagggaataaaaaatctgttagttgctacatttccaaacactattaataatcaacaggtaacaacttctattaaaacgtgtaatattttcataactcggaatgtgaccccaaagtgtgctctgcgtcccagttccttcctagtgccccaacagataggaactgtcccttctaaaggacattcaggcagtgtcatcaccatggccgattttgccagggttctaaggatggcaccagaagcggctgcctcttccgtgtctccctgcaagtctgagaacactagattctggtgcaacacttctgtaaagggcatcttttcactccacgcagagaggcaacaacgaggacttgaatacaaccacaaaacatcacacttttcacaaagtaagtgctctacagaggccgcatctggatgtgcatgggtgctgaaacctgtcccaggaggcagctgcactgacacaagcctctcaccttcacgtagcagtaatagtgcccggcatggcagctgtagcccgagtgcaccaggacagcatagagtccatacatgacaggatcaccattattctgggacatatacggacgtatgttgaggaattccggatagcctacatcctgtttgaaaaatcaaggaaaagacaaataaaattcactttgagagtaaagatcaatttgccctttccatccacaaccacacaaaatgcccagcttgtctggtctttaacaatttgggggccgggcacagtggctcacgcctgtaatcccagcactttgggaggctgaggcagggggatcacctcgaggagttcgagatcagcctgaccaatatagcgaaaccccacttctaataaaaatacaaaaaattagctgggcatggtggtgcactgcctgtaatcccagctactcaggaggctgaggaacaagaatcacttgaacccgcgaggcagaggttgcagtgagccgagatcgagccactgcactcagcctgggcgacagagcgagactgtctcaaaactgccccgccacaaacaagaaaaagacaatttggggcgaatgggtgtgcagcaacgctgtgcaggagctcccccaggcaatgattaaaaaccaagatgctggccaggtgcggtggctcacgcctgtaatcccagcactttgggaggccgaggcgggtagatcacaaggtcaagagattgagaccatcgtggccaagatggcgaaaccttgtctctactaaaaatacaaaaattagccaggcgtggtggcacgtgcctgtagttccagctactcaggaggctgaggcaggagaatcgcttgaaaccaggaggtggaggttacagtgagccgagatcataccactgcactccagcctcgcaacagagcgagactccatctcaaaacaatcaaaacaaacaaacaaagaaaaaacaccaagatgctgagaagtgagtcttctccagccagcctatgggaaactttattgtcccatcaagcaatgcaggatctgttcttgtctttgtcaagcatctccattagttctctcaccacctggttcctaacgatcaaatgagaagggtcactcattttctttccctccactttacaggaacattgttggtgggagaaaagggagagaatgctgggttttagatcttcagaaataaaagtgctgaattaatatagccaactgctaccgcaagtaagacttttaatcaactggatcagaagaaaggtcatgctaaaatgtcttcccaaaactgaccaatttttcatagaaaaaaatacacgcacacatatacataacatgcatacatatatgcatacatgcacgcataaaatacatgcacacatatatacatacatgcatacatacatcgtatacacacatgcacacatatatacatacacacacacatatgcatgcatacacatgtacgcatatacatacatgcacaacacatacatgcacgcacacatgcatacgcacacatacacacacatatacacacatgcatgcacacacatatacatacacacacatataatacgtgcacacacatatatacatacatgcacacacatatattcttagcagtaatagtgcctggcatggcagctgtaggctgagtgcaccaggacagcacagagcccacatgacaggattgccattattctgggtcatatacagacgtgtgtttaggaactccgaaaaacatacgcataatttttttttttttttttaagaaacacagtctcgctctgtcacccaggctagagtgcagtggtacattcatagctcactgtaacttcaaactcctggactcaagcaatcctcctatctctacctcccaagtagctgggactataggcacgcgccaccatgactggccaattaataaaaattttttaggccgggcatgatggctcacacctataatcccaacactttgggaggccgaggtgggtggatcacttgaggtcaggagttcaagaccagcctggccaacatggtggaaccccgtctctactaaaaatacaaaatttagccaagcatggtggcacacatttgtggtcccagctacttgggaggctgaggcaggagaatcgcttgaacttgggaggcagatattgcagtgagctgagatggtgccactgcactctagcctgggtgacagagtaagactccgtctcaaaaaaaaaaacaaaaaaaccaaaatttttttgtagagacagggtctcactatgttgcccaagctggtcttaaactcccagtctcaagcaatcctcccacctcagcctccctaagtgctgacattagagttgtgagccattgtgcccagcctaaatcatttttttaaactgagttgtgggatttgttgaaatgcatagatcttcagtatatagatcaaagagttttgacaagtatatactgatggacatgcagaacatcaactagaaaattcccacatcccagtcattgcccccatctcaaatattcactgttctgatttctgtcaccattaattttgcctgttcttaaacgtcacataccatcagtcatgtgccacataacatgttttggtcaatgacagaccacatatacaacagcgatcccataagattataatactgcattttcactgtaccttctctatgtttagatacacaaatacttcccattgtgttgcaactgcctacagtattcaggacaggaacaggctgtgtaggtttgtggcctaggagcaatgggctataccatacagctggctccgtcatctacgtctgtgtaaatgcactctatgatgttcacacagtgacagaattgcctggtgacacatttcttaaaacatgcccttgtggttacacgacacctgagtctacgacattaagaatctgcaaacacatttgagaaatgctgacctaagcaagcccccaccactaccagtgaggaaacggaggctcagccaagggtgtcattccaaaccacataaccaggctctcagaacagaactctagatttttatgagatacagacatctactgggcacggtggctcatgcctgttatcccagcactttaggaggctgaggcaggcggatcacctgagctcaggagttcgagaccagcctggccaccatggcaaaaccccatctctactaaaaatacaaaaattagccaggtgtggtggtgggcgccttaatcccaactactctggaggctgatgcaggagaatcacttgaacccagaaggtggagacagcgccactgcaatccagcctgggcatcagagcaagactctgtctcaaaaaaaaaaaaaagagaaaaaagaaaaaagaaacacatcttctatgaaaatgccactataggccaggtatggtggctcacacctgtaatcccagcactgtgagaggtcaaggcatgcaggtcacttgagcccaggagtttgagaccaccctgggcaacacagcaagatgctgtctctacaaaaaactttttaaaaaattaaccaggcatggtggcatgtgcccacagtcccagctactcaggaggctaaggcagggggatcgcttgagcttgggaggtcaagactgtagtgagcgctgattatgccactgcactccagcccaggtgacagagtgagaccctgtcttaaaacaaaatgaaatttaaacaataaaataccatcgtgtcaaaagtagtttttctaaactccatatttcataaaaagccagagcatgcaacggcacctgttctagacatcaaaaggacatggacaatgcaagtcccaccgcccagtgctcatcacactcatctggagaaccctgaaagtccctgccaggaccagcccaagcacaaccagaagctgcggtaaatccattaagacagtggccctggaacttgactgtgtataacaagcattcagggattttgcaaaaatgcagattcctgggccctgtcctccagagattcaaattcactggcactgggataaacccagaaacgtctatttttaaaaggcgtcccaggttgcttcccctctctgtgactgtcttcccgtcctggacaagggcgaaactacagtccctacttcacaatatgtgtagaacctttagaacagggacaggtactgtgtaaacagcagctatcaaactcgtggctatcactttcttcgtgttattctgatgccgactgtggcccacggagctgcctgggatggtgtcacgagcgctcaccttggtgatcttccccccgctgaagttggcaaagcgcttgagggaaagggttaagacgttggatgttctgtggatggtgaagcgcttgctggctggaaccttcttcttgcatctatgaagaaggtgatgagaaagattaatgaatgattgattcgtgctctgaaaaatgttgtcttaacgctaagttaataacagcaacaactgctctgtaatagtggaatcttcatcaatgagatttcgaccttctgctcctctcaaaatcacattaagcatgcctcaagtaaaggaaagctaccacagggaaataagactacagaaagtgggaagattctaaagcaaaaaaataaaagtactgtacccaccaggaaactaaataaaatacaggaaaaagttgctttgggccaacacaggaaagagcaaattaaagcagatgtggctgagtgataaaacgggcaggcaggaagtcaacgtaagcaaagctagaagatgcgcaaacacagggagagaaaacagaagcagaggcgcgcagcttggagagctgcaggaaacagacctaaagaagagtaaagcagaattaagaatatattctttagtgcctacagctttacaaggacctagatataaagatattcagccggctgtagtagtgtgatcccagcactttgggaggcaaggcaggaagatcacctgagttcaggagttcgagaccagcctggccaacaaggtgaaaccctgtcactactaaaaatgcaacaaatgacaaagtaagagttctatctgcagaaacggaaaaatgtccaaaaccagttaagtaaaaaatgaaagccaaagaaaacactccttaagaggcaagagagcagctggttgggcacagtccctggggcggccgcccggtgccagccagtgtgaactgatgtgagctcgtgctctgccacgtcctcttggtgtggccccatggctggtcacttcacttctctgtgcctcagtttcaccatccctagcaatgggaaaccacagcccctactgcacaatatatgcggcatctttagaacaggtatggtgtaaactgtagctataaaaatcatagctattgcttcattcgtgttatttagaagtttgagtttttaggacacacataggttcctcaagaaatgcgagcagcggtcaccgctaaggaagagtgggtgggcacaacactgtcaggtgaggggacttatttcccgtctggtatcagtcttctgccacaagcaacgtgaaacttacttagcacacatgtaggcattctctccactcaggacatctgctttcacaaaaagttccagagcacgcacaatattcgcagcttgctgaggaggacaaaaacagggagtaaaatacacagcagaggaaaaaggctgattcaagaaatgccaaatttaaggtcttttttaggctgaggcagcaaatcacagaacttagactcgcataaaaatttgcccactagctgccagattgggactccttctccagagacaagaaatgaaagcagccaggaacagcggctcacgcctataatcccagcaccttgggaggccggggcaggaggatcattgaggccaggagtttgagacaagcctgggcaacatagcaagacccctgtctctgcaaagaaatttaaaaaattagccaggcgtggtggtgcatgcctgtagtaccagctgtgtgggaggatcacttaagcctagaggtcaacactacagtgagctatgattgcgccactgcactcctgcctgggccacagagcaagaccctgtccctcaagcccctataaaaaaaaagcaaagcaaagaaatgacagctgcaggtctgccatgaatcagtcacttttatcaggatgatcttgtagctggacctgctctggagcttgggttggcccagcaaaggcagaccaccctcccgcaccctgtagctgcagcaggatgtgcgacaaagccaaggctgctctcccaggtgaggcccacagagccaccaagctccaaaggctgcacgccgcccagagcacacaacagactctcctcaagccctggggacagcgttgttcctgttcatgcttcaggacacaaaacccaattttaccatttttttctttaaataaaaggatacgcttaggaaaaactctagaaaaaaacaggtaaagacaatggtctgtactgcaaggcggcagggagcaaaggagttttctccctatctattttgatctgatgcctttactgttctgcgggttctgtttcaccctctggcctcgctctcctactgcaaaagtgaagggcaggacagatctgtacccggatctccagcgcgacgtccaagtaggggtcgtaggtgtccgagacgctcttgcacacggagcacttcactgcaacagaacagaggcagtggagcaggtggggcctggcagaggcactcccagctcccaagaccgagacccagcagggaggcagactctcagcagggctttggccaaagatgagattcccactagcccctgaagcatcctggtgtccgaacagagagctctctttcaccactgaagttcacaaagatggatgtcaatatctttgcactcacagggccctccctgcctggactgctgaccaccacgtgcggtactctcctgctgagggagagcagagggaagagctgcctcctccctgcacgcgtgcacggcacttcctaatgagaatatatatatatatatatatatatatatatatatttttttttttttttttttttttttgagatagagtcttgctctgtcactcaggctggagtgcagtggtgggatcttggctcactgcaacctccacctcttgggttcaagcaattctcctgactcagcctcccaagtagctgggattgcaggcatgtgccaccgcgcctggctgatttttgtatttttagtggagacggggtttcaccatgttggccatggttggccaggctggcctcgaactcctgacctcaggtgatcctcctgcctcggcctcccaaagtgctgggattacaggcgtgagccaccacacccagccctcgtgggaatattctaacaactgctccagtggccaggcgggccaagagtctcagaggaaaccatggctcaagacctcagagactgacccaggtctgcacagcgaagaaagagccccagcctgcgttccaactcttagggtttcctgggttcatgttctaatcctggcaagaagcagtagaacaaacgtctccacttaccgcgtgatctgagataccctccaaaaatttgatggaccaaggtagtagcctgcgtttgacgatccaacctgaaaaggagaccccagcctttaagggaagggctcagcaagatgacacgagggatggccccatcccagcagccccatgcccaccagtcacaagctcagcgtgaggctgggaaactccaccccccacccgagtcaccacagacccttaacctccatcctcagcccacgctgcctggcagtctctctgcagagctctgacctcctcagggccccactacccacagtagccatttcaaaccttcacaatgcccactgccacccacttcacagaaaataaaagccccgagaaatgtacgtgtatcctcacccagtgttgccttttctttttggtctcaataaaaagtaagtacccaaatctagagtgaggcgggaggccaaacatccccctgagctagggcgcccacccagcccacccttccacttctctgctggtcacagacagctggtccccaatctgggaagaggggtgggggtgggaacaaaggcacaaacaggaccaaatctccccggctctgcacccgtctcagagaggacagcggagtcagacgtgggcttcggggtcaggagccctgccctcattcatgtcccccgcaccgctcactaactgggatctgaggcactctgagctctggggcctcttctcacccggacccggggctgcctggcgcctcccacgcctacgtatccatatggtagctactcacgctggaaggttctgaaacaatacaccacatccagtctctgctcctggttctacttgcaacccactgcatctggtcctgactcactgctctggaactgccttcctcagagtcgcctaaggcctccaggcatgaggccagctgggtctgcaggccctttactaggaggctgcgcagtgcgccggtgcacccactccctccagaagagcttcccctctccccaggctctccagccccgtctccccagctgcttccccgactcctcactggcacaaagcggggctgtttccagggctctctccacgtttcccacggccacccagaccattccacacccgcaggctacacttcccctcccacagaacatgcacacctcagtctctcatctggcctgtgtgactatttaccatggcacttcccagactccgggagctctgaaatacttgggggaccaatacaggatcattcaatttttattctgcaaagttagaaaatgaaaaatcaactgccaccatctactgtcccaccattcttcaaaagtgaccttttaactgcaaatactagcaaggacgtaatctctgcatggactgagaactgtgggtagctgcgtgtgatggcggctaccaaaatccagaccacccccacaacccctctgtcatccagaagcccgcaagcaccagcgcccgcagggccacaaggaatcccctcttgcataacccaaagcagaggaagcacaactgtcaccttccccaggaggaggaaaggcaagctgagtgacagcgagctcccacaggcatcccactgagcctggggacaaagggcagtagagaacagctgggcaagaatggaggagggggcaggaggtggcccgagagccacccggaatcacagctgcaaagggcaccctgaagtgaagtgctgaatatggggtctcacaggcacgcagctggagtagcagtctccacaggcatgggctctcagggggagaaggcaaagaggcaggcaggcagccttagaagggcagtgaagggcaagagaggcaaaaggggaaacatcagggtcctgaaaaaaactcaaaactatcctagactatcgacccttctgctgccagaggaaaagccaaccatgaaagtgcactgcacggggcagacagaggaggcgctctggatacgaatcttgaaaaccagccgacccacaagataaatgaaagcaggcccagtctatgcaaagtgcttcaagcacaaagcagcaatgaacaagaatcaaaacacctcatgggatgcaaactagctccagaaaacagacatgatgccaaggacacagccaccaaaactccaagccgaacgtcctcaacacagtgagagtggcctcatttctggaactagagtgccacacacagctgccctcctggaggaacttatgagaggccgggcttcacccagccaggagcgcaccagaggtgccaactggagggtgggcaatgagcaatgggaagatgtaaccataacccaaggctgggcaagaaaaagataccaccttacaggtgccaacaaaaaaaatgaaatcatgcacgctaaaatggcaagagagagaggagaggaaaagagctaggaagtaaagggtaccacggtggactgccaaatcagacagtgaggagcgaggaaaacaggaccaggtgcatttcaaaagggcgtatgaaaccagcaggcagcatggagcgtgcctgcagttccagttactgggcaggaggattgcttgagtccaggaggtggagcctgccgtgagcggagattgcaccactgcactctagcctgggagacagagcaaggccctgtctcaaaaagaatggtttatgtacaaaggtagccattaaaacaaaaacacacatcttcctaatatccaaagaaatttgagaaataaagaaaaatcagaaataagcacagtaaatatgctacctataattactataaaatacataaatatgacagaattgagaccaaacttttcagtcataacaggaaatgtgaaggggcttaacctgcctattaaaagatggtcattttggcttacaaaacaagacagatcttaagaacgcctctaagaaagggttcagaaagtgacagcaaggggccggcggaaaccctgcaaaagcaggggctgcagcactgacactggccatggcagaattcagaacaaaagccactccacgtgacaagtgaagacactcagaatgctaaaagcaacgatcctcaatgaagacatgacagttacgaatatctaaccacaaccacctgtatagagcaaaactagaggagatgcaaggagacaggcacccaccagaattccagtaatcatggacttaacacactattccaaacagatgaaggggacaagagcacatggatatagaaaatgaaaactgcatcatcagtagacccatccatggacagaggagcaaaccaacaccctggcagtctcagcagccaccgccaagcatgcaggaaacattcacaaacgctggtcacctataatcacggagaaaacatcaggaagttccatgaagtagaaatattatcaacacgctctgatcataatgcaagtaacatcaaaagtcatctacagaagcaaaagacaaaaaggcccctccacctgcaaattaaatggaataatttgctttatgagaagctcaccattggtgtcattcttattttttctcactccacatttcactacagaccagtgaaagctccctcatggaccgacatctggtgagccttcatctctcccctggcaatgcctggccacctgacacctggcctccctcctctttccagcaatcctggtaccaacgaatggctcaccaccacccaccccaatgcccagaccgcagacctgcattcctcccatctcacagccccaaatccaaaccgttattcattctacctcccatcctactcctcacgaatttcttccaccgtagactctggttaattggactgactgaagcccaggggtcagtttctgtcctaagagcgctccaggtggctgcaccctgtgcccagagccaggccccctgctataggctcgctgcactccccctgcaggtgctggggacaccgcaaccctcctcctggggacacctacttgcctttgcaggccctcgggggtcacttctcccaggaagccgcctctgggtgaggtaatatccctctatcacagcattggccacaccacattgcaaacgctgctggggtccactgtcttcaccaattacaccatgagctccacagactccaggaccatggcttctacctctcagttcccagtgctagctatggggcccagcacacagggaacagcagttcaattacccagttcactgaagggcagacctgggatcatacagggagcaaggaagcttgagccccttcaggagaaggggaagaacgcgtgaccaaaccctcaaaacagacaaaaaggaatgcatcctaggagtgcagtgaaagttgccttcatataagtgatttaagtaagttttcttaagccaggaatggtggctcatgcctgtaatcccagcactaagaggccaaggcaggcagatcacttgaggccaggagttggagaccagcctggccaacatggcaaaactctgtctctactaataatacaaaaattagccaggcacggtggtaatcccagctactgcactccagcctgggcgacagagcaagactcctgtctcaaaagcagttttctttctgtaagtcttatttacgtaagaatatcatccactgaggccagtagttttgccatttcaatcacttattgccacaactcaacttctctaaagaacattctaggtatattccctaaactatttaaagtatttctacgatcctaagctgaggcaatacaaggaagtcctaagcatttcctgcctgttttctttggtctgaacctatgaactcaggaatgacacaaagacaatttgtgatggcaaccatcacatataagggcttacgtggcgtgtgaataagaaacagcagccaggcacagtcagatcctaaagttataaacctcctcatgttaaagctccctgtttgtacatatacatgtacatataaattatactgcagagacctcattcctaccaccccaacctcttttcaaaaacgacatgatttttaagagactgaaaaagtccatggtaagaactgaatgcccctaagaaggtctgctaacatatttccccctgactgagctgctcagacacagctgccgccaccacagccacccgatcctaccaagccgccccggaccagcaggacgtctccggagacagccctttcccaggaagcaagggcaatcccctatttgggctccaacagtttgagtacccagaggcaaattctgccacgtctacccaagggcagcctgggtagaaaggtgccgggctggctgttgccataggaatgttctgctgccaccatgtagaaaaggtgtccaaagccctgggagggtgggtggggaagcacgcacttggcacagccattcaggcaggctttctgcatggcgtcgatggtgtaccgcaggaactcatgcgcgtcctcctggttcccaaagcggaagtgtcgggcgatctctaaaagaggaagaaacagggagggaagagctcgtgtcttctcatcaaacggcctgcggctgctttcctgaatggccattcctggctgttataaggggaaaatactgcaacttttcaaaggaacaagtgaggaaaacaagagctctacatggattttctatatcccaatcacaattcatcatggccaccactttctcaataagattgcaggcttgagcattcactactgcacagacaaggaagaacaccaagccctcaaaaatgtaaaatgccggctgggtgaggtggctcacacctgtcactctaacacttcaggaggcctgggtgggaggatcacttgagcccaggagttcgagggcagcctgggtaacatagggagacttcatctctaccaaaataaaaaataaaaaaattagccaggcatgatggcatgtgcctgtagtcccagctacttaggtggctgaggcaggaggatgggttgagcctaggaggttgaggctgcagtgagctatgatctcaccactgcaatctccagcctgggcaatagagcaagactctatctcagaaagaaaaagaataaagaatgtaaaatccggcaggatgcaatggcttatgcctgtaatcccaacactttggaaggccaaggcaggaggatcgcttggagctgggagttggagaccagcctgggcaacatggccagaccccatctctacaaacaatacaaaaacagtcaagtgtggtgcgcctgtaatcccagctactcagaaggccaaggccgactgcttgagtccaagagtttgaggctgcagcgagctgtgattgcaccactgtcctccagcctaggtataagagcaaaaccctgtctcaaacaaaaagaatgtaaaatccattgaatatctctccaaaagccaatataaaacacaggtgagtaagtatttcacagtgctacaatttacacagatttcaaaaaccggtaataggcctcttctttctgccaagtgaatgtgaatgagacttttttatagcataggcaactgattcctgatattcagaatggaattggtacattcctcatccatccctcctcccagctctccctcaggcccacctgcctgccccaaatacacaataactcctccacctgcccaaaggaaaagctacctgtcctgacctgcccccactaagaggcttccccactgaccccagcccacatgtctctaaactgctattccttgagtctgcaccaccacatgcagggctgttagcacagagggattcccaagacttcatccatgactcactcttctctcccttctaccaactccccagcacctcctacagggcgagcacttagcaggccttcagtaacagatggagaatggcacagtggctcgtgtctgtaatcccaacactttggcaggccaaaacggaaggactgcttaaggccaggaatttaagaccagcctgggcaacatagcgagaaccccatctctacaaaaaattaaaaaataaataaatcacaaaaattttaacatggattgatgcttacttttcaggtctcggatgaaggagacgggcttgatggcgttgccgctgttggcgaaggcctggacaatgtggttctgcatgacacacagcatgcagaagcttccctggtggcctgccggcgtggaaggaggagcaattttaagacaagagctttcaaagaactcacggtgaggcccccaccccaaacgttaacacagccagaaacacaagcaggtaagagcaaaccaggctgtgagagaacggctgagccagagatcccagacctctgctgactgggtgaccaccaaggaaatgttattctctgctggatggcgtttggaagctatgatccatccaaagctgaaactctcaccatcacaacctcacaccatcaccccacattaatgctgacctgtgcatgatccttttcagatttcactagtattatttacttataaaaagactaaggcagattttcaaaatgaagcttaaacgatgtattctcgaatttctaagctgcatcacatggtaaataggctaaaatattttagggctgacagccccttagtagtgcctcagatatgggaccgtctgttccactggttctagtaaacacctcgctaggatacatctggggttgaaaatgttttctgggaagatccagatagcaaatcctttcctatctgagggctatacagtctagtcacaactatgctcctgtattgtagaggaggcagccatagacaatatatgaacaatggggtatgaacgtgttcaataaaactttatttacacacacagagagcaggccagatgagtctgcccacccctgcgctacataaaacgcctcactaggcattaggctagacagtggtcctttttttttgagacagagtctcactgtcacccaggctggagtgcagtggcacaatcttggctcactgcaacctccgcctgccgggtttaagcaattctcctgcctcagcctcccaagtggctgggactacaggctcgtgccaccatgccaggctaattttttgtattttagtagagacagagtttcaccatgctggccaggctggtctcgaactcctgaccttgtgatccacctgcctcagcctcccaaagtgctgggattacaggcgtgagccatcgagcccagccccgacagtggtacatttttacctttcaaattatgatgtaaataaacactgctgtgatcgccgaactcccctcaatctctctcaaccccattttccatgtaccttcattcaaagtcaccactatcctgaattaggcaattatcgttctcattcatgtattatcacacacatgtgtatccatgaacaataaatggcactgtagctacatgtttccaaacttcctttctataaatcgtatcatgcagttacgtatcattcagcaatggctttacaaaaatccatgttgctagacatagctccagttccttcaaatcttccagctagaatatttcactgaatgaagagaccactgttatttatgtatccaccactaacacacatttagcctttccattttctctgctatcatagacattttgcaatgaacaatcctgcacctgtctccttgagcacatgggtcagtttctctaaagtacacgctcagaagacaaatttctggaccaaagggcaagcacgccttcaaatctgctagatactgttgtctactacacagtgcattacctattatctattatcaaatagatccatctcataacacaaaactcaacccaaatcatttccccgcaatatctccaactccttagacttcaaaatcaataatgcaacagcatgcagcctgcttagcaaatagacattaaaatgctattatttacacaaaattcttcttgaagagatgtaaaaaactctccatgagattgcctttacataaaggggaggtttttttcattttagacttctgcttgccttttctaactatatccatgttattacttttatttttaaaatgacaataatgattggtgaactcaaaattaggcaaaaattatgtcatttaaaagaaaatacaggccagatgcagtggctcacgcctgtaatcccagcactttgggaggccgaggcaggtggatcgcgaggtcaggaggttgagaccatcctggcttacacagtgaaaccccgtctctactacaaatacaaacaattagccaggcatggtggcacgtgcctgtagtcccagctactcgggaggctgagccaggagaatcgcttgaacctgggaggcggaggttgcagtgagccaagatcacaccactgcactccggcctgggcgacagagtgaaactccatctcaaaaaaaaaaaaaaaaaaaaaaaaaaaagggacaacataaatattgaagagctcttttttttccaaaacctaacttcaggtaagatacagttttactacaaaagaaaatggccatgggggcccacacctgtaatttcagcactttgggagggtgaggcgggtggaacacgtgaggtcaagagttcaagaccagcctggccacttggtgagacccccatctctactaaaaatacaaacattagccgtgtgtggtggcagtcacctgtaatcccagctacttgggaggatgagggaagagaatcgcttgaacctgggaggtgggggttgcagtgagccgagactgtggcaactgcactccagcataagcaacagagactctgtctcaaaaaactgtgtagaaattaagcctctaatcattatatataaaacgctgctggttgggcatggtggctcacacctataatccgaacattttgggaggctgacgcaggaggatcgctgagcccaggtgtttgagaccagcctgggcaacactgcctaaccaaatctctacccaaagaatacaaaaaaaaaattagctgggcatggtgctatgagtctatagtgccagctacttgggaggctaaggtgggaggattgcttgggaggtggaggttgcagtcagctatgattacaccactggactccagcctgcgtgacagagtgagagcttgtctcaaaaaaaaaaaaaaaaaaaagcttctttcagcctaataaaatatcactcttaacagggtaaataacaatctaagccaggttctccagcaatatatgagattaatttaagtggcacatggacaaatatttattcatgtaatttaggaaaatataactcaaaagtcaatccatgactacacggacatagagagatttgggaaacaaaaggacaggactgaactgcgttcctcctagactatttacacagtgtttctcttctagctaaatattagcgccagagacagtccagcctacggcaggagctgctgctccgtgccacgtgcacagtggaccctcgtcagaacaaacaccccttaggatcctcaactcttcaaatgccatgtgctaggagggggagaccacagccaaagcccacttaggggtcactcaggatccagtggggtgcaggaaaaaaaggccacaacgtctcttcatatgttccaagatagtaagatgcactaatatttcacagtgatactggcccatgggaccggtattggaaggaagaccaggcgttccccttgaagggatggccatggctgccttactcacacgcttgctgctgacatgctgcaacaaactgcagcttacctgtgccaggttacggggatttacagatattatctagttttaactaaattaatcctcacaaagttggcaactggctcaaaaagatcctgcagagaaaccaagaatggaaggcagctctacagtggaagagccctgacaggcctgggatagcagagtcttactgccaaaaccatgagacgaaaacaacagccatctagtcaaatcttactgaaagtccacccagaaccacctcaaaattaccaaggtcaccactggaaataggggctacaattagccatctcaacaatgtgcttctgcagggcacggtggctcatgcctgtaatctcagcactttcggaggcagaggcaggcagatcacctgaggtcgagagttcaagaccagcctggtcaacatggtgaaacttcgtctctactaaaaatacaaaattagccaggcgtggtggcgggcacctgcagtcccagctacttgggaggctgaggcaggagactctcttgaacacaggaggcgggggttgcagtgagccgagattgcaccactgcactccagcctgggcgacagaacgagactccatctccaaaaaacgcccccaaacaatgtgctgcttcatctcaacaactatgccttgataattaacctttgctgctatgaagccatcgcaattagcaagatgtttacaaacacttcccactgcatggccatcttgtgttcttttttttatgtttttttgagacggaatcttgttctgttgcccaggctaaagtgcagtggtgtgatctcagctcaatgcaacctctgcctcccaggttcaagtgattctcctgcctcagcctcccaagtagctgggattacaggtgtgagccaccgtgcccagccagtagcagtcacttctatagcactccctctttgcgggctgctactccaggcacttgactcactcagaatttatcggagcctcacgcaactctgtaaggaagacagtctcattcttccatagaccagggacattctcaaaaactcacagttactaaggggcaaactgggaagcaaaccctacaggccaggctcctgagctgtgttttcaactgctctgctccctccagaattctacttagagattttctgcgatgaaaacatcctgcattcctaggataaacataagttgcttacagttttttagaaactgtgtcatttggtagtattttcctacaatttttatatctatgttcgtgaagaagttgtggttatccattttctttctcgcattttccttattattgttatccgagttataggaactttatagaatgagctgggaaagattctctcctcctctattctttggaagaacgtgtaaaggattggaattgtttcttaaaagttacatagaaattggctgggcacagtggttcacacctgtaatcccagcactttaggaggccaaggcggttggatcacctgaggtcacgagttcaagaccagcctgaccaacatggtaaaaccccatctctactaaaaatacaaaaattagccaggcgtggtggcgtgcgtctatagtcccagctatttgggaggctgagacaggagaattgcttgcacccaggaggcggaggttgcagtgaactgagatcacaccaccgtactccagcctaggcaacagagtccgtctcaaaaaaaaaaaaaagttacacagaaataacattgtctctgcttggggttttttatgggaagatttttaaccaatgctttaatttctttaatagttaaaagactcttcactttctatttctttcagttttggtaagttatatcttatttcacctctattttaatcaaatagagcacaccaccacatccagctaattgtttcgatttgttttttgtgtgtgtgagatggagtcttgctctgtcacccaggctggagtgcagcggcatgatcttggtcagctcactgcaacctccaccttctgggttcaagcaattctcctgcttcagcctcccgagcagctgggattacaggtgcaccccatcacgcctaatttttatatttttagtagaaaccgggtttcgccatgttggccaggctggtctccaactcctgacctcaagtgatctgcccacctctgcctcccacaggtgtgagccaccgtgcccggccttgatttgtttttgtagagatgggatcttgctgtgttgtccaggctgcacgttttataatacacataagatatgctgatacaacaacagatgcataaaacaattgggctaggcatggtggctcacacttataatcccagcactttgggaggctgagatgggaggatcatgtgagcccaggagttcaagactacaacgagttgtgatggagccactgcattccagcctgggtgtcagagcaagatactgtctctaaaaaaataatatttgtatatatatatatatatatattttggaagtatcttttgaaaacgtttctgtctgggtaattatttacagaaaagcttggcgaacacagccccacctgaccgattcaccttcatggcccattctgcagcaggcatgattcaaatttaggtttcatcagttactatacattatgaactaccctcctaaatttgacccagactgagagcagcagtgccacaagtgcatgggcttatctaatccagaggacccacagccaccccactgctgcaaacccacactcacagctgcgagcatgctccttggagagcaggtagttggctagaggtggtgtgtaggtcaagcactggatggtggcattgagaaagcaggtgttgccaaggttgtggagtcctgcgcccacgcggaagacccgctcccacctcagagacagtcgctccgtggggaaaagcactttctgcggggctgggactccgtcaccacagctctcatacgtgtgctcactgcctgaggaagaaagggacaagggaagaaaagaggaagacgtaagtccacacacaggtcgtccacaaaaagaaactcctgaagcatacacttagcatgcagtgactcggaacatggcaccagagaagaactggtgttctggtttacaggacattcctggaaagctcaggagtaaacccagccatcccacggacctcctaggctgcttggctaaagaattcaagggcccctctatagatggaggacacagctcagagactgagtggcggaaggagccaggcctggcactctgcaccacactgtgcccacatgcagcccaccccatttctctttcttagttccaagcctgactttcgactgtattatacttgggatagggggacagcaagtccaaggacccaccaagtacacagatccaccaagcacacagatttccttgctaccaaccctgtatcattacttctataactgaaatccactgaccccatgtaaaaattcataactctttgaccacattctcttgtttttcctactaattagtcaatatttaagtccatccacttcgtcaccccggagtgagggcctctctgccagcacactgcacatctgtaccctgtctcctggccggtgggtcatctccactcttgtggcgactagctccctctgttttggggttgagcaacacatatttgctctttaaggcctccagctggtaggagaagctcttgctggctggctcgaactcgattttctgtaaaaggaccttcttggcagaggaggcaagaagcttccccagttctccatcatcagccgagtccttgcggccgggtttcagggcctccttcaacttatccactattggcatggtgcatcactgtggggacaagaagaaacatagagccatagataacgaaatcccgggacaaaaacatctcttaagatctcctctttggtcattatggatgctagccaccacaaaagctcccctggatcagtgatcccctggatcagctgcacaaaggaaacagggagacccagcactaatcacttggacatattagttcacatttcccccacaaaaagataagatgccactacaaatagaggtgagcagacaacagtggccctgaggcagccagacagcccctgccatgtgcatctcttcatcagatactcatcaagtggctctggacatcattcttggtgccatttccttccaaaggtcatcacgtggtccaaatgtctgctccaaaacaggggcacactaattctcacatacaaactggttatacacacacggacacacacacacacacacacaaacggacacacacacacacacccacgcaataaatgaattagcatgcaggtcagatgagcatgcatgtctgtacagacctgcactcttcaatatgaaggccacaggccacacgtggctactgagcatgtgaaatgaggctagtccaggttgagaggtgctataagtgtaaaatgcacaccagattttgaagagaaatactcactagtataagaagagaatgtaaaacatcccagtaatttttagatcagttacctgttgaaatggtaatattttatatatattgagttaaataaattatgaaaatgaatttcacctgcttctttttaatgtggctactataaaattttaaattatatttgtggcttgtattaatctccattacacagtgcttggagtacaaattatctttttaaaagtgaggaaggagaagaaaagcaagtagcaggcctagagactagtatccattagacacctaaacttaaacaaatgtcttcccaggactcttatcaaaagagaagaagaaaagccaagcaggagagtggggagatcacaggctttggaatgtggtggccccgggaggttctatcatccttagctatgaaacccagggacaactactatgacttctccaaaccccctattctactgtaaaatagcaacaaaaataataggcttgggaagtgctttagagcttgctacatactacagtccctaacagaggatcgatactgttggtgcagctgcatggaaactgtaaccaagaagagacccctgcacctctccaatcgctacctttgtatccaccacttgccctcccctacccaccacctctcaacttaaccttcccaaacacagcacagactatctgagtcacaatttcaaaaatatgtcccttaaattgctcactcacatcagaaaaatgatgacttcctctggtattcagtacccagcctgccctcagagaatcaacaagtcaagtgtgccccaaaattctgctctagtgaaagtaaggacttcctccagcacctcatattaagccattcaaatttatcactgtggatcatctaattctatacatggatcaagtatctttttctacaaaaacttctgtaaagaaaagccaggtgcagtggcctgggcctgtcgtcccagatgcttgggaggctgaggtgggaggataacttgagggcaggagcctgaggctgcagtgagctatgattacgcctgtgaatagccagtgcagtccagcctgggcaacatcgtgagaccccatctttaaaacaaaaaaaatcgtggctcacgcctgtaatcccagcacttgggaggccgagacgggtggatcaggaggtcaggaattcaagaccagcctggcgaagatgtttctctactaaaaatacaaaaaaactagccaggcatggtggcaggcgcctgtaatcccagctacgcaggaggctgaggcagagaattgcttgaacacgggaggcagaggttggagtgagccgagatcgcgccactgcactccagcctgggcaacagagcaagacttggtctcaaaaaaaaaaaaaaacaaaaaacaaaaaacttctgtaaagaaatttcagaagcttatttaaaaaaaagcattataagttgtctgatttgagaaaataaaagagccttttctcatgagaattatcaaagacttctcaccaactgaacaatcactgctgcgtcacatgcagacaattcaacggaatcaaaaaatacacagaagcctcgcagactcacctgggatgtgcagacttgggcctgctgtcctactgcggcatggaaccaggatcttaacggagggctgagtttggttgggcaggtgctacgcggagctcctgaatgtaagcgctcctggactgtggcctgttcaaacaccgaagccgcagagcgggcgtcagagcctgtgggagggacagggagaccatcagtggaggcgactcttcctgtgccttctcttcagctacttcccagggatgcggcgcgcaccgggaaccctctaccacgaaaaagccgtccaaggagcatccacgcgtgcactcaggatgaggcgggtggaccgtactacctcatcaccagttgttgtaatgcacacgatatgaacaccttaaccttgaccccagacaagcccagagaaggaaaacctccccaacacctgccagtcagctccagtctaatcttatttccaaagagtaagaggtaataaatccccaagttttggatttaatgaaccagtaaaacttcaataacaacaacaacaaacctcagggagtaataggagttgccaaaattttgctttgctaagtgtggattttctctttcattaccatctacgatcactatgattacataaaattaaggttcgtaaaaacagtttacagtgaaaacattcaaacacacagatggagaaccgcacagggagcacatgagccccccttattcagcctcagtaactacatctgacccatcctgagtcacttcccatccccaggtaattctacagcaaatctcagacctatgacttcatccataaataaaagcataccaactcccgaaaaatgtgtaaggaaatgatctcagaataaaagccatctacaaagtgaagacatccagtcgtattaaaaactccccacaatatcactgctttcggttaggactcacatctaccctggaaggtgagaactctgtcatgcacaaccaacgcttgagaaccacttagggaggggataaacgaaccttgggagatgtaacccagtttcactcgagataagtaactttgaacttaacccactccttaatgtagatgcagagattttgaacacaatttttcaagtgggacaggtcaatctctacttcaccaattccacctaaaacattaagcaataacctaaacaacgctcgctcgctctctgacgtgtaggagcccgagacaagtgttcctgtaatcactagcaatccctccgacgcacacaccatccacactctacccaactcaggaaggatgctctctcttgtccaaggacagcacaggcctcatccacatttccacctgcgcgaaccccagccagcaccatttaggctcattcccgctccctcctccttctaaagtcacttttccaggatgaactgcaacggacgctcgcagggtcaaccacgtgctggggagaggagcccacggaagcagcggcctcccggggcccagcgccgcgctccaggggcctcccgggcgactccgcagcgcctgccccgagcccggccgcggacacagcgacccgagcacctctccccgagcatggctccgtggcgagcgttacgtaaacgggggcgcgcggagtctcccctctcgtgtgtctgggtttggcggccgccactccagccccaggcccaggacccccacgccacccgccagaagcagcagcatcggaaccgcaccccgccccgggctccatggcctcctccgcaaccacgaggaaggtgcccgccccggggccgcacccgccccgctgagctctgcggccgcacgcgacgccctcgccctgattccgacttcaacctctccgaagttgacctgaatcctgcacagacagcgggccccggcgacccccatcaccggcccggagcccgggggacggcggagaccggcgaggacagcccggccccggaccctcctcgggaatacccgggctctggagaagcgagctcgcgagcgggcggagcatcccgggtcctcctcggggacggccgaagccctgcgcggacccgcgcccacgttctccctgagcgtcccggctgcgcccgccagcccttcccgcgccccaggcctcgcggaaccccccgccccggtctcgtccccaggcctgcgcaccgccccgacccgaccccagcctaccccggcctctccgcgggcgcgccacaagcctacgcagccctggcgactccttcggcccgcggcccagcacgcgcaccatccgggcctccggcgcctcacacacgtgtcaccgcgacgcttaaaggcgccgcacccagcgttcgcgctgcgctaactccgaaagggttgggaggctttaagaggcggggctagattccgctaactccctgtccccgcccaccgccgcttccgtgtcgcctacgtcacctccccatcacgggaccccgccagcctacgtgatgacgcaagtgcgcagagccacaggcgctcccgcccctgtgccgcggcagggtgacgtctccgcagcgcactagaggtgccgctacttccgggtcggccgagcacacctggcggcgtggcggacgcctgaagtgtgacagtggcgcgcgcccccgccccagaacggggactcgagggactttgcccacccctgcaacagccctcccgcgctgtctcccgggcagggagaaggctgggctcccccacctgcccctggccgtcaggtggctgtggagaagcggaggcgcgggcgctcggccttaacgtcccgggctctggggccatccgtgactcccacacgcggagcacctgcagtttggggagggagggatctgggagcgatcggccaaagcctggggctgccgaggaaatggctcttcggaattagggatctgagagtgtgagatttgacctttgtaggctggtggcggctgtgcaatctctagctccacccactccctccaaaagctttgtcctctgacagctctgcgaaggttttagctgagtatttgtgagcacgtatttcttttgcagtatttttaaaaatcctcttgatctgaggcaacttcgctggcttcctccccattcccttgggcaggttgagagtgttggttcctggcctgacctcagaaactcagagaagcacaggatgggcataaactactttatccaaaaggcagaactttgcaaacacagtcgtatctgctgtgtcttttttgatgtaagtaggaatgatgagtagggtgaagtcacaggtaaacaacccaaaacgaatttccatgccctccccacggatcctaaagcagggactggagatggggagagaggctagatgtacttggaacaaaattcaccttgtatttattacctgggcgctggtgttttttgaaaaaagcaaacaagataaccatattagtctgatgctgagactatgccctatctgtaagaatccttgggctgggcgcggtggctcacccttgtaatcccaacacttggaggccaaggtgggcggatcacctgaggtcaggagttcgagaccagcatggccaacatggtgaaaccccgtctctactaaacatacaaaaattagctgggtgtggtggtgggcgcctgtaatcccagctactcaggaggctgaggcacgagaatcccttgaacctaggaggcggaggttgcagcgagctgagatgtcgccactgcactccagcctgggcgacagagcgagactccgtctcaaaagaaaagaaaagaaaagaaaaaaaggcagggcacagtggctcacgcctgtaatcctagcactttgggaggccgaggcaggcagatcgcttgaggtcaggaattccagaccagcctggccaacatggtgaaaacctgtctctactaaaaatacaaaaattagctgggtatggtggcgcacgcctgtaatccgagctactagggaggctgagacaggagaatcgcttgtacctgggaggtggaggttgcaatgagctgagatcgtgccattgcactccagcagcctggacaacagagcaatacttggtctaaaaaaaaaaaaaagaaagaaatgcaacgtaggtctctcacgaaattagcccaaatcttcagccatcttctacaggctgtgaaaccaggagaggaattgagtccatcttaccttgacctcccaggcagggagcggaccaggtaatttttgggtgacaatacaactattctgttaatgcacctttttcttgaggtaagttctaatgtgatccgttttggttacagctttctataacagaatattttattctttcatctttaatgtttctctagttttctcttttaggatttagagatcattcagtctcatctcaaatatttcaatttccatgtggttctttcataaacatttatccacagtgagcctgccctgcattctttgggtgtggctgacagttgcagccaccctcaggtctgcgggggtgggtgtgttgcccctgaactgcaatagcagaatttctccctagcctggcaggggagtgcaatcgtggacttgcttttccacccgctggggttgcatttcataggtgccgagtgcctggggggcccaggccttttcacatgagggttttcagcccagatgtccctcctgctctaggggaacccttcacatcagtcaggtgacttgctggactggtagagcctctgccatcagcctctgatgcaaaaccttttctcaggtgtctgtgcggtccatggagacccgagttcccaggtttgggagggatgccactttccttaggaagaacagcaatgtatgtcgtccttcccatccatgcagatgggacagggctctcaggaaatctgccattagcatcgccctagaagatgcacaggcagaggcagctgctgggcacaggcacttggggaagacaggagccatgacgccacgccacctgttggtacccaaaggaagtggctcttttggctgcttggcaccattcttatgacccttccattttgtttctagtctcagaaggggtggagaaagtcatccttcctaaatggtgttgactctcagacatctgaccgtgccaggagaatggctgtgcaaggcggcagcccaggcccgggcaggtggcggccaggagttgggaccacagagggcactagcaagagcagcagctgctccgagatgctttggcacaagtcaggatacgtattttgtagttttctcttgttttttatttttctgaggtggagtctcactctgtcgcccaggctggagtgcagtggtgcaatctcagctcactgcaagctccgcctcccgggttcaagcgattatcgtgtctcggcctccagagtagctgggatcacaggtgcacgccaccacacccagctgatttttgtatttttagtagagatggggtttcgccatgtttggtcttgaactcttggcctcaggtgatctgcccccctcagcctcccagagtgcaaggattacaggcgtgagccaccgcaccccacctcccggccttttctcttgtttcattttggtaaactaaattagtttaatacctctaccccatcggtggttggaattccccacctcaatcattttgggggctctctgcctcctttgaataggacagatctccaggggtttacccaggctccgaagagccactccaggcagccggctgtttggggaggtgcaccctggtcttctagtctgcggattccctgcatcgctcccctggtactgctctcaagctcaagggtcacctcagccagatgtgccctaggctggcagaggtccttcccctaaatgcagctgggcaggatgccaccctttctacaataagttcggtcccagggattcccccaacacacacacacatacattctctcttactcacatcctcacacacactcacacaccccaccacactcacacactttcaaaatccaccgactctcacgctcacactcgccagccctttcccttgctctgtcacttccctccaagtccccgccccacacagcctcctgcagtcccagcccccttggtgccagccatctctggtgccagccatctcccccaaatatccacccttctgggctcctttctgcccagagggacctgaagtttccctaggaagcacttgctaaaggcctccagtctccaactcctggggaagaaggatccaggcctctgccgcacaaagcctccactgttctcttggggctggcaccccttcctgtggccctgtggcaccaaacaaattgattcatccagcgaatatttcttatttactctgttccacatggtggtgagtgaatcaaccctggactctccccacaaaggacttaagaacacgcaggtcatgaacaaatgaacacttttgcataatttttatgaccaacggtgaccaggccaagagcaggatgaggtgatggagaataccttggcctggggcatcggaggaaactcttgcgaggatgtgctacctccgttgaaagtgggaagatgagagaccggctgtaagaggagcaagggaaggaggttctggaatgagagaacagcacgaacaaaatgcccgagacaggagcgagcttggcaccttcaagaaaataaagaggagaatcactgaacctggcacgtggaggttgcaatgagctgagatcgcgccactgcactccagcctgcgagacagagcgagactccatctcaaaaaaaaaaaaaaaaaaaaaaaggaaagaaaaggaggccattgggatggctgaggctggaagggtggaccaggtgccccacaggcaagaggtcccaactatagatgaagcacgcaggctacagacaggtgagtggtgcctcgggtgagaggcaagtttgtctccataggtcatcctgctacacggaattctccagaatcccctgcaaaggtgtagatgggctgggtgcagtagctcatgcctctaatcccagcactttgggaggtcgagtcgggcggatcaccttgaggtcagaagttcaagaccagcctgactaacatggtgaaaccctgtctcaactagaatacaaaaattagctgggcatggtggcatttgcctgtagtcccatctactcaggaggctgaggcaggagaattgcttgaacccgggaggtggaggttgcagtgagccgagatcgcgccaccgcactccagccttggtgacagagcgagactctgtctcaaaaaaaaaaaaaaaaaaaaaggtgtagatggcttatgctttgtgattttcaatgtgacttgtttttatttttttccaaatctataggtcttttattgaatcatctaaatatcacagatacttaggtctgaggagtcatccaacatcgtgtttctgtagctggacaactcttagaacctcctcagcagcctgcggaactgttcctttttaggagacgtagacagcaccccaacattttctgatatccttgtttttaactattgctgcttgctgaatcagagcagctgaatttgaacaagactgaaacaagctcaatgtcgcttccttcaaagattaattcgacattctgggcttgagatactgaataagcaacacctggcctcatccgaaccctgcagatggattttccacccaagatgtttcagatttcaacgagagtcccgttctcctggataacgacgtttctggggaagtgagcacccacagaggtcatcttgtaatggaacccagggcaacccctttgaccatgctccgtacacgactatgaacagtcccaacggcagccggctcccttcagtttccccaccgtttgtcaacccggagcctcttttcctttccaaggagactgagttctacattgatgtgattgaagtctctcctcaaggctgtgtgcagtggctcacacctgtaatcccaacactttgggaggcagaggcaggcggatcacttgaggccaggagtttgagagcagcctggccaacatggtgaaaccatgtctctactaaaaatacaaaaattagccaggcgtggtggcacatgcctgtagtctcagctactagggaggctgaggcaggaaaattgcttgaacccaggaggcggaggttgcagtgagccaagatcgcaccactgcactccagcctgggcgacagggcaagaccctgtctcaaaaaaataaaataaataaataaataaataaataaataaagtccttcctcagggttcctctcaggcccttcccaataactgtgtgttcctttagagtaatgttgaccttttctggaatatccatgggttggttgctgggaacggtcttcattctcacagtagatgcggcaaagacagcagttttacttttttaatataacttccaggcatcttaaccttggaattttgaacatactaggacgtgtctttccatgaatattgtaaattgtcaggctggtctaacaaggcggttttggaattccactttgggaggtgtaggaagaataactttagagcggaccaaccctcagacactgctggtaggcatgtaaaatggtgcagtcactgcagaaaacaggacagtgcttcctccaaaagcgaaacataggactactatacatactatctatacatactatataaactgtatatatacactatgtatacagtatagacatagtatatatgtctacactatatacatagtatatacacatagtatatacacatagtatatatacatagtatatacccagtatatatacatagtatatacacagtatatatacatagtatatacacagtatatatacatagtatatacatatagatatacgtatatactatgtatgtagatatagatactatctatatatatattatgcttccagacttaattattgcaatacaattttttgtgtactattatgtataattatattgtaattttattatttatttatttttgagacggagtcttgctctgtcacccagtctggagtgcagtggtgccatctcagctcactgcaacctctgtctcccggattcaagggattcttctgcctcagcctcccgagtagctattacaggtgtcgcgccaccatgcccggctagttttttgtatttttagtagagatgcgatttcaccatgttggccaggctggtcttgaacccctgacctcaggtgatccaccctccttggcccctcaaagtgctgggattccaggcgtgagccaccgcgcctggactgtattgcaataattatacataatactacatatatacaaatatacataatattgtgtatatacatatatactgtatatatagatatataaatatatagtagtttagatatatgtatgctgaatcagagaagctgaatttgaaacaagcttaatgtcctttccttcaaagattaatgttgtattaatgtaggttaatgttgaatatacatatatggctctatatatctatagtagatatatatctacatatatctatagtgtatagatatctatatacatatactaagtgtgtgtgtatatatacgccaattaaaagcagggacacagatatttgcacacccatgttcatagccacattcttcacaatagccaaaaggcggaagcaacccaagtgtctactgatggatgaatggataaacaaaatgtaatagatgcacacaatggaatattagccatgaaaaagaaggaagcatggatccatgctataataccaatggaccttgaagacgtgcaaagtgagctggacataacataggtggaatcatgcaggatgatagaatatttagaataggaaaatccatagagacagaaagtagactagaggttaccaggggctaggaggaggaggacgggggttattgcatcatggttacagagtttctgggtggtggtgaaaaagttttggaaatagtggtgatggccataaaaacattgtaagtgtaattaactgaattgtacacttaaaaatggttagaaggtggccaggagcggtggctcatgcctgtaatcccagcactttgggaggctgagagggcagatcatgaggtcaagagatcgagatcatcctggccaacatggtgaaaccccgtgtctactaaaaatacaaaacttagctgggtgtggtggcaggtgcctgtagtcccagctactcgggaggctgtggcatgagaatcgcttgaaccccagagtggagattgcagtaagccaagattgtgccactgcactccagcctgggtgacagagcgagactgtctcaaaaaaaaaaaaaagaaaaaaaatctatagtcacagcaaattgcctatcataaaattgatgctagtaaaatattgtaattccactgtttggatttaattattttttaaagttagatcaggtaaaaatatccattaaaaattaggagggaaaagatactgctactgtgtgtcctataactaggctcaagttcttccatcagctccaaagtattttatttttatttatttatttttttgagatcgagtctcgctctgccacccaggctggaatacagtggctccatcttggctcattgcaacctccacctctggggttcaagtgattcttctggctcggcctcccaagtggctgggattacaggcaggagtcaccgcacccggccagctccaaagttctttaaccagtcctggtggctccccagctccaccaccaggctccatgtcccttcagattggatcttgcagggtctcttgctgcttttccatcatgggtgcacacatctctgttgatgggttgaggctgacctcacctgtccccatgcatttttcttccacagggtaaacaagactgagaggaaataatggtgtctagttgtgtccctaacaatgtcgttaccccatatgtgagtctacaaactgattttttctttttcttttttttttgagacagagtcttgctctgttgcccaggctggagtgcagtggtgcgatctcagctcaccgcaatctctgctgcctgggttcaagcaattctcctgcctcagcctcctgagtagctgggactacaggcgtgcaccagcatgcccagttaatttttttgttttgttttgttttgcttttgagatggagtctcgctctgtcgcccaggctggagcgcaatggcatgatctcggctcactgcaacctccgcctcccgggttcaagcgattctgtatcagcctcccgagtacctgggattacaggcgcccaccactgtacctggctaatttttgtatttttagtagagacggggtttcaccaccttggccagggtggttttgaacgcctgacctcaggtgatctgcctgcctcggcctcccaaagtgctgggattacaggtgtgagccaccgtgccaggcctaatttttgtatttttagtagacacgggatttcgccattttggccaggctggtctcgaactcctgaactcaggtgatcctcccgccttgccctcccaaagtgctgggattacaggtgtaagccatggcgcccggcctacaaactaatcttaaatcgttttcaaagatcagcaaaacatggataattgttgaaaacagatcatagacacatggagttggtcataccattctctgcatttttgtatatgttttaaattttccataatgactttaagtttgacttaaatgcataaatatatgaaaagggtataaatcacctggcgtgctgcttactaaaactccaaatgtgggctgcaaatgccaagtaagttcatttgtatgaaatggaaagttttgatattattattatagtataccactcaaccattttccctacatatttggacatacagaagaaataatccaaatatttctgcagtagatattaagtggatcacatttaatgtgacattggagcaaacttcagatgtcgtaagtttgttcttgctttttgggcagtaactgcacacagtaggaaacacgattcttctggctgcccctggaataacagattctgcacaacagtgtgcacatgggccagggggcagctaactgttcaaatacaccattgaagaatgtccatggctgggtgcagtggctcaggcctgtaatcccagcactttgggaggccgaggcgggcggatcacaaggtcaggagatcgagaccatcctggctaacatggtgaaacctcgtctgtactaaacatacaaaaaattagccaggcgtggtggcaggtgcctgtagtcccagctacttgggaggctgaggcaggagaatggtgtgaacccgggaggtggaggttgcagtgagccgagatcgcgccactgcactccagcctgggcgacagatcaagactctgtctcaaaaaaaataaaattaaattaaaaaaaatttcatatggtgaagtattatgagacttttgattgaagtttgaattatgatgggaacatctttctcagcacaaggatagggtgggggcagggagaaacaacctggagaataagagagacccgggaggccaagcactgtggcttaccggaggccaacgtgggcagatcacttgaggccaggggtgtgagaccagcctagccaacacggtgaaaccccgcctctactaaaaatgcaagaatttgccgggcatggtggtgcccacctgtaatctcagctactctcgaggcagaggttgcgttgagctgagatcacaccgctgcactccagactgggcaatgaggcgagactctgtctgaaaaaaaaaaaaaaacaaaaaaaaagaaaagaaaagaaagaaagaagggggagcttcaatagttatttaaaaaaagagagagagagagagacctaggagttagatcaaccaactgcaatggatggatcttatttgggtcttgattcaaacccataaaccacgcaaaagcatctatgagacagtcagagatgttagaacactgactggatatttgatgacattgatgaattctaagtaagtttttgacatgtgataaagctattttggattttgtcgttgttgttgtttgagacaggatctcactctgtcacccagattggagtgcagtggtgcgatctcagctcactgcaacctccacctcctgggctcaagtgatcctcccacctcagccccccgagtagctgggactacaggcatgcaccaccacacccagctaatctttgtattttttgtagagttggggtttctccatgttgtccaggctggtcttgaactcctgggctcaagcaatccgcccaccttggcctcccaaagtgctaggactataggtgagccaccgtacctggcctggaaaaaggttttaaaagtagtttttattttttggctgggcacggtggctcacgcctgtcatcccagcactttgggaggcccaggcgggcggatcacaaggtcaggagttcgagaccagcctgaccaacatggtgaaaccctgtctctttttgtatttttgtaaaaatacaaaaattagctgggcgttgtggcggacacctgtaatcccagctactcaggaggttgagacaagagaatcacttgaacccaggaggcagaggttgcagtgagccaagatcatgccattgcactccagcctgggtaacagagcgagactccgtctgaaaaaaaaaaaaagtagtttttattttttaaacatatgtgtactggaatatttataaatgagactgcttcatgcctggaattttttcttccaaataatttcgtgaatggtgggtgaagactgagtgtaggtctaaagctggccatgaagccctcagtgtcgaagctgtgagacgggtgcatggctctgcgtgtctctataataaaaagccagaggtatgtgttgaatgaaggggaccctctcctacacttctgccccttcatccacctaaggaaaccacatttgcttttacctgtcccatctctgctgccccgtctctgccactgcatcgcacttttcttttcttttttctttttttttttttttgagacagggtctcactctcttgcccaggctggaatgcagtggtgcaattatagctcactgcaacctctgcctccgaggttcaagtaatcctcctatctcagccttttgaatagctgggaccacaggtacatgccaccacgcctattttttgcagagacagggttttgcgaagttggccaggctagtctcgaactcctgggcacaaacaatccacccgccttggcctcccaaagtgctgggatgacaggcgtgagccaccacacctggtctgcatcccatatttgactcagagctcactggccttgtttctctggaggacacagggcgccccctcccgccggacaggagaggctccttgcagaggctgattcccattcttgagctaggaagtggccgttctgaacatcggatacagccacacggagagagcccacgttctctttgataatactgtttattgtccacggaccgagcgattgctcaagaatgatacaaagcatcagagacatgcgcagtctgcttgtcaactttcaacaactcttgtgtgttcccagcaccggaaggtctcagacttcatattccagcataaacacagtgctcccctcccccaaaaatccaaacggaaacaaaatcaacagagctttaaattacggcagcaagtccaatatttcttaatacttatcaagcaaagatttgaaaataactacaatgtaaactttattttaaatattttgagttgcttgcaggatgaaaataggagaagagagctgtgcttagaacataacatataaattaaacgatgccaaatggagagccttcttaaactatatatatattgccactatttattgtgaaggtatttgagcggcttcctctgtcagctgccacccggctcttcttaacctgttttgttttctgctcagcacggttaaaagaccaacgtgtgtggatcaaatataaaggccacacctttcagaccgaacctactcaaagatcctttactttgcaataatttgaactggagaaccaaagacgggagacgaatgaaagcaaagatgctcaaagaaccaaaggaaagacctgaaggaatccacctgcataggccacgcgttccactctgggtcaaatgcttccacgatgcagaaacctttttttaaaaaagtgcaagtctaatacctaccaagggtaataaaaaacacagcacaggaatgattacagctgatgtcaaaaacaaaccaaaacattaaaaaaacaatcagcagaaacaggagtaaatgttacatatgatatcaccatacaggaagcgaacaggggtggggtgttatatgggttggaggggtctggtggagttgtatatactgaaatcacatggactggtccattatgacatcttaccaactttaggtcactgtacagcatgaaaacgcccgtggggcaggggccgattcctggataccctcccagtctgccctagaaagggaagtcatcaagatctgtgctgaccaggtcccggtgggcatgggggctgcatgccacttgggggtcaggagtcttaacaggtgctttggggttgccgctgaatagaacaggctaaggtggctttggaagcattttgcaagaccacgcccaggccgccaagcttcggtttcattgcgtgtgtatgtttacataatgtgcctgtatatcgtcagtttatctttacaacacaggtgggaggaaacaagagattctccttatcattaccgagaaagttcttcctatcctaacccccatatcactggcttcaggaaaccacactgagggaacacataggttccctagttccctaggaagtttcttagctaggtaatctttgtcatttaagaaatacaagcagaagttggtatatctgcaactcaggttcacctatcatctgagaattcacctttagaaaaataagatgtctcttaaaacaggccatagtgtcctggaggctgagaaagaagtgagtgtgtcaccaaagccacctacctccaaaatccttcccttcctaggctggacttcttactatgcttagctggcgtcacatgcagaaagccccgtgcagaacgatggctgtcagtctttgagggagggaacactaagcctgggagggcacagcaagacccagctttttctgtcctcaggatgtgcagatggggagcccagccgggccctgcacacaagcccggataaagcaaagctgtgcaactcaatccaggtgcctgatgccagaacaggcaagaagcaatggcaaccgcagcagctagggaagggaccttgagggcagccaccggccccggacagcagcctcaggacaggacctcaccgattcctcctgcaagctggggagcatgtgggcgggggggggggggtgggggggtgggtgcagaccaaaaagactcagctgaggctggaacgcagctcagctggggtttctcgctcccatttctacaaggctcagagggaggctcccactggaattctgaggattaataggattgatggggctccttcaagaactagccactggttccaggctgcccttggatgtggggggagtcaggtgctgggagctcatggtgggcaccggggcgatgggagcacttgccaggggcagggagtgcagaggcgtggaagctgcagaaaacaagggccatgtccctctcaagatgaaagggacctggtaggcctgctacacagtcttgcaacgaccctcaaaagtttctgcaaaatgcacatttccaggccctgccctaacccagctgggagatccctaagtgctgcctgcttggcatctgtgacggtgccaaggcagggactgggagggaagccgcgtgtcccagccctgcctgcacccaaggatcgaagccccagacacatagtgcctggcagagggaggatgggatgaggaccttggacccacgtctccctccagacccacaaccatgtctaaaaggagaaggggggagcagaatcatattaatttggacccatgggatgagtgttttattcatgctgtttccaggaagggatgtcagagctggaccagtcgaaacccttggaggctttttttgcagttggccacaggggcgttggaggcctgcttatgggtcctcgatgtcgagaaactcctgcttggggggcgccgcgccgcggtaccacgcacaggagccgtcacttctcttgatgcaggcgaagaacttggcctggtgcccgttgatgttcttctctgtgacccagtccatccagaggcactcgtccggggaggagatgtagcacgggatcatggggcagcgcgtgatctggggaggggcacacggagggggacggagtcagggacccaggaaggggtgggcagaggctgctctgggggcatgtccagaacccggcaatgtgcctacctgtcatgtgcagggatggcagcctctcccgagacccacggttcctgcaggggcaggcagctggcctgcgagggggtctaacctgcagggaagctgtgccctgcccaccgctgccccccctcctactgcaggtgtgcttccctttgggccatcttctaccttcctgagcatgacagaatggcctcagcttggccctgccctctgggggacacagcaacaataaaagggcctgggtttcctggagacagattccagcccagtgttgctcgcaagccgagccccgaggtcatcggcaactagcaatttggccaaggaaccctaggctacaagaggatgaccgccttcaccaccgtggaaagaaaaaggaaaaacttgcttttgatttcatgctgggcacagaggagtttcgcttaacatacgtgtggctggagactatgagttcagaattcctgttttgaacatgcggagaaggggctgggggccgtcaggagggagggcagccccaggcagctccccagggaaggccaatccccacagcctcaccagagtctcctggtcccagactcactgggagtgacccagggtgggaggtgcccagcactcagccatgcttcctgcagggagggtggggatagggtgctaggagcccacagggtaggagccagcctgggagccctggaggcggtaatctcaccttccacagccacatctaggcgctgcactgctccagctgtgcctggcacaacctccgggctcattttaagaggagcaggtgttcaggtattctcaacacacagaccccacatagacaccaacccaggtgtgaaaatgtcgggaatgttggaaacagcgtaaggcctgcagtgccttctcataagccacacaggcgtttgcacttgcacatttgtagaaaattctccatgggaccatattctctctccccatacagctcctttttctggaagctacaggtaacagagctgaattcatgctcttactctcaaatctcctagccttccagacatctccctcttttttttttgggacagagtctcactctgtcaacccaggctggggtgcagtggtgtgatctcaactcactgcaacctccacctcccacattcaagcaattcttaagcctcatcctcccaagttgctgggatcacaggcgtgcaccacctcacctggctaatttttgtatttttgtagagacagggtttcgccatgttggtgaggctgatttccaactcccgacctcaagtgacccacctatctcggcctcccaaagtgccgggattacaggcgtgagccgcagcgcccggcctccagacatcccctgtcagagatgtgcctcagggctctccagggaccaggggtcaaaggctctgtccccagccagacagccttactcttgggatgactctaccttcccagagcctggtcttagatcaggagccggggattaacgggtcctggaaagccagggatcaaaatccctgccgtccatctggagacactgggaggaggcgatgctccagcagaggcaggacctgcttaccttgcactcgcagcccatctggtacctgtggttcaggctcttcttctgggtggtgctcagggtgtcccagggcacgatgaagtcacagagggtgatgtgcatcttgccgtccccctcggcctttcctgcggagagacggggatcaccgagctcagggagagggaaaagtcctcctcctgcccagctcctccacccggcgcaggggcgctgggatttcgttgcaacaatcctgtgcactgtctattctgagttaaaacacagtgggtggccaggcacggtggctcactcctgtaatcccagcactttgggaggctgaggcgggtggatctcttgaggccaggagttcaagaccagcctggccaacgtgatgaaaccccctctctactaaaatacaaaaaattagccgggtgtggtgtcacacgcctgtaatcccagctacttgggaggctgaggcaggagaatcgctcttgcaccccagaggcggaagttgcagtgagccgagatcgcgccactgaactccagcctgggtgacacagcaagactccgtctcaaaaaaataaaaagtggaaaaaaaaagaaagccataatgcatgttcactgacagaaacttaaacattggaaacaaagaaaaaacttcctggccaggggcggtggctcatgcctgtaatcccagcactttgggaggccgcggcaggtggatcacaaggtcaggagatcgagaccatcctggctaacacggtgaaacccccgtctctactaaaaatacaaaaaattagccaggcgtgctggcgggcacctgtagtcccagctactcaggaggctgaggtaggagaatggcgtgaacccgggaggcggaggttgcagtgagccgagttggtgccactgcactccagcctgggcctgggcgacagagcgagactcagtctaaaaaaaaaaaagaaaagaaaaaaattccctactttcattacccacagctaatattttgatgtatttccttccaatattccactattgattttgagacagtcttgctctgtcgctcaggccagagtgcaatggtatgatcatagctcactgcagccttgacctcccaagctcaagcgatcctcccgtctcagtctcctgaatagctgggactataggtgtgaaccactacaccctgctaattttttatatttttttttgtagaaacagggtcttgctatgttactcaggctggtcttaaacttctgcgctcaagcaatacccccactttggcctcccaaagtgttaggattataggcatgagccaccacgcctggccccaatattcttttaaattaaattttattctaaaaaaaggatagagacgatgtttcaccatgttgcccaggctggtcttgaactgagcttaagtgatcctcccaccttgacttcccaaagtgctgggattacaggtgtgagccactgcgcccggccaatattctcttctatgtgcatcttcacacataaaacgtcatgcagtatgtagattatattgtttcctgttttgtttttcacaaaatattaattcacaggtgcttctcccatttgagtttaaacttataattctgcatttttccattatgaagagccaaagcatggaatttttgaaaattaggaatctgctctgaattcccttcatcaggcatgatgagctgtggcttctttctgtacttccggctcctgactcagctgcctccttcctttgctgaagatactacattggcaatagccttggcgttttacaagcaggaggaaaagaacaaagcagtgtgttccagtggctgacagaacctaatgacagctatggaagtcatttaaaaactcatccctcaggccaggtgcgatggctcatgcctgtaatcctagcactttgggaggctgaggtgggcggatcacttgaggtcaggagttcgagaccagcctggccaacatggcgaaaccccgtctctactaaaaatacaaaaagaaatagccaggcgtggtgatgcatgcctgtaatcccagctactcaggagactgaggcaggaggatcgcttgaacccgggaggtggaggttgcagtgagccgagattgcaaactgcactccagcctgggcgacagagacagactccatctcaaaaaagaaaataaataaaaaataaataaaataaaaactaatctttcaggcagggcatggtggctcatggctgtaatcccagtactttgggaggctgaggtagggacatcactcgaggtcaggcatttgcgactagtctggccaacatggtgaaaccccgtctctactacacatacaaaaattagctgggcatggtcgtgggtacctgtaatcccagctactcgggaggctgaggcaggagaatcgcttgaacccagtgggcagaggttacagcgagaagaggtcatgccactacattccagcctcagtgacaagagcaaaactccatctcaaataaatacataaaataaaaaaaatacaaaaaattagccgggtgtggtggcgggtgcctgtagtcccagctactcaggaggctgaggcaggagaatcacttgaacccaggaggtggaggttgcagtgagtcaagatcaagccactgcactccagcctgggtgacagagtaagactctgtcttcaaaacaaaaaaaacaaaaacaaaaacaaaaaaaacctcatccctcctgctacaacagccccttgtgaagagacacaggtgtcagtgatgagcacccacgcctggcagagactgatgggcaattccttgagaagcagacagagcctcaggctgtgccctaagcacttttgtttgacaaagtttcagcgcatctgacttaatgatctcaggcacagcaccagcctcagaggatccactaatagaaacacagcccagcgaaggactaatgcagctcatcgactgcacccctgtgccatggaaatgtggatggcttgcctggggctccaagcagacacaagtggcctccattgtcctgggcacggggcactcattgtgccagctccctgggtttgaattcttatgctcgcacttcctgttctagctgttcctttatcttcgggtccttttctccgtttagacttatgtgacattccaggtgaggaacaggatgagaaagtagaattactcctgtaacatttattccaaatcctataacttcataaggtaaatgtttgggtggccttaaacaattcaaaactagctgggcatggtggctcacacctgtaatcccagcactttaggaggccagggtgggcagatcacttgaggtcaggagttcgagaccaacctggccaacacggtgaaaccccgtctctactaaaaatataagaattagctgggggtggtggtgcatgcctgtaatcccagctactcaggaggctgaggcaggagaatcgcttgaacccgggaggtggaagttacaaagagccaagatcgcgccattgcactccagcctgggcaacagagcaagactccgtctcaaaaaaaaaaaaaatcaaaattagatatataactttccccactagacctatagctattttctgtgagttcagaatagatcaggaaggagcaaaacagacagatggaaaggaacccattcctgtatcctggttgattctggcatttggcgcccatacaggtataccgcagccccttccctgtccagcctgggcacctgccactacagacaggctgaagctctatcctggcttcccagcttctatggtgatttccactgtatgtatcacttgaccagcattaactcccactttctattagatttgcctttcttctgcatctcgctccttaatcagagagtacgtatagagagtaagggctgtgtcttaacccttttgtttccacagttccctgcacatagtaattgctcaataagtttactgatgagacacacccgtgcttgttctaatgatatgcttcacattctgccttttcctgccatcttctcttttggccttttaccaccaattctggcttcctcaggaggtaagcaatggcaggaagaagagatgaagtgaaaattgtattttttcttttttttttttttggagacggagtcttgctctgtcaccgaggctggagtgcagcggtgccatctcgactcactggaacctctgcctcccaggttcaagcattctcctgccttagcctcccaaaaaattgggattacaggtatgcgccaccacccatggctaatctttgtattttttagtagagacacggtttcaccatgttggctgggctggtcttgaactcctgacttcaagtgatccactgcgcccagccaaaaaattgtatcttttcaatggtcctagttattgggctaacatgaacgtggctgtcatgtataaatgtgaagagaggaccgcctctggtctgattaagacttggttgggtgtacacaccgtgagcatctgcagcgatgttctacttatgtctgtctccgagaaaagcgaggcatgagtctgggttacagaaaaccgggaattaaaatttgtaacgaagggttgtatgtttatttttccttttggagaagaggaatgtagaagaaaattacagggccaactctgtatgagtctcctggtgcccgactcgacacgtgagactgagtcatcggtccaggaggaggtggcccgctcaggccatgcggtcactcactggccacagccagccagagctgagtggttcactgtgccctgtgatttctggttagcccctggataaagggtctatcctgactcgaggcaaactggatctaggttcctgcctcgggaaataaatgccagattcaatgtggagtcatctgaccaaggctgggaaagaagtcagatgagagaggttcctctcgccatgaggtgagtcagccactgtggccattaacagcttcacccctgctccccctcccagggagaggaggatgaagtaatgcagcctcattggtggagaagatacacagccagctggccactgggcaggtctcacaatctttgttgatttttagaaacaggaagtccatgtgcagatttgttacatgggtatattgtgtgtccctgaggtttggcatatgaacggatccatcgcccaggtagtgggcatagcgcccaataggtagaattttttcagcccttatcctgcttcctccctcccacctccttgtattccccagtgtctcttgttcacatttttatgaccatgtgtacccaatgtttagctcccacttttaagtgagaacatgtggtatttggttttctgtttttgcactagttcccttaggataatggtttccagctgcactcatgtggctgcaaaggacatgatttccctccttttcacggctgcgtagtattccgtagtatatatacaccacatttctttatccaagtcaccattgatgagcacttgggttgattctgtgtctttgctattgcagatagtgcggtaatgaacatacgggcgcagtgccgttgaacgatttattttcctttgggtatacacccagcagtgggattgctgggtcaaatgctagttgctttctcagttctttgagaaatctacaaagtgtgccccacagtgggtgaactcgtttacattcccaccaacagcgcataagcgttcctaagcgttccctttactccatagccttgccaacattggtttatttttattttttatttattttttttgggtggggggacagtcttgctctgtcgcccaggctagagtgcagtggcacaatcttggctcactgcaacttccgcctcccgggttcaagtgattctcctgccccagcctcccaagtagctgggactgcaggcgcccgccaccatgcctggctaattttttgtatttttagtagagacgggatttcactgtgttagccaggatggtctcaatctcctgacctcatgatccactcgcctcagcctctcaaagtgctgggatcacaggcgtcagccactgcgctgggctgtttttaactttttaactaaagctcttcaaaatctttcaatgtcagctttctaccgaggatcccgccacaggtccagggagcaatgccctttcagcagagccttcacgctcattctgctacaggctaccctagccctccttagaccttcagtatgactctctgtatcgactcaccagcttttcatgcagtgctgtgctgcgtgtatgggtcactgtcatctccagtgtaagacataaaattatcagctacccttgagtggggcctgaccaagataaccagcatctctgtgatcatcatttctggtctcctactcccactttcatcctctcaacaacccctcgtggggcagatactactgtcatcatcccccatgtacggatcggcatgggaggcacagacaggtaaagttacttggccaaggacattaacgagtcaggtgtcagagcacacattcgaactcgagcaggtgttttcagagccttcactcgggcatctcattgtatttcttcacatcttttcatgacacttagtcgttatctttttctcttctaaaacagagacagggtcccgccctgccacctgggctagagtgcagtggtgcagtcctagctcactgcagcctcaaatgcctgagctcaagagatcttcctgcctcagcctcccaagtagctaggactacaggtgcacatgaccacacccagctcatctcttctttccttccttccttccttcttcttccctccctcctttcttccctgcctctctccctctctccctgactcccttcactccctccctccttcccttcctcccttcctccatgcctccctcccccttcctccctcccttccttccttccttccttcctcccttcctgttttgtagagatagggtcttgctatatcgtccaggctgatcttgaactcctaacctgaagccatcctcctgcctcagcctcccaaaatgctaggattacaggtgtgagccactatggtcagcccatttccttattttctttatgcaataaactgtttgcacttggcacctttagttctgtgtcctcatcaaaacctcgtgcctcctccttgagatactaagtagtatctgagttaaaaagttaatggaaatgttaacaatttgaaaacatatatagaattcaacttagaagagtattacatattttggaaactttaaaatgtatgcacataaaaagaaataaaatctaccagccgggtgcagtggttcaagcctgtaatctcagcactttgggaagccaaggcaggcggatcacctgaggtcaggagttcaagaccagcctgaccaacatgatgaaaccccgtctctactaaaaaaatacaaaaattagctgggcgtggtggtgcatgcctgtaacctcagctactcaggaggctgaggcaggaaaattgcttgaacctggggggcggaagttgcagtgagccaagatcgcgccactgcactccagcctgggctttgttgcctccgtctcataaataaataaaataaaataaaatctgacccatgctacaacatggatgaacttgaggacattatgctaagtgcaatgcttcagctatggaaggaggtatgactctacctgtacgaggtgtctagaatgggcaaattcatggagacgaagtagaaaggtggttgtcaggggctgggcaaacagaggaacagggaattattggttaatggggagagagtttcagtttgggatgatgaaaaacttctagaaatagatagtgatagttacacaacactgtgaatgtacttaatgccgcccaggtgcggtggctcacacctgtaatcccagcactttgggaggccgaggtgggcggatcacctgaggtcaggagttcgagaccagcctggccaacacagagaaatcccgtctctactaaaaatacaaaattagccaggcgtggtggcacatgcctgtaatccctgctactcggaaggctgaggcaggagaatcacttgaacccgggaggcagaggttgtggtgagttgagaccacgccattgcactccagcctgggcaacaagacagaaactctgtctcaaaaaaaaaaaaaaaaaattagctgggcgtggtgttgggcacctgtaatcccagctacttgggaggctgaggcaggagaactgcttgaacccgggaggcagagattgcagtgacccgagattgtgccactgcactccagcctgggcaacagagagagactccatctcgaacaaaaacaaaaacaaacagagagcttcagcatgggcgaggattcagctgggtatgtttggacaccggtgctggctcagaccaaggtcacttttgcacccaagagtccttccgcagcgctgcagtttggccagaaagcccctagagggcagtgtgacgaaactgagctgggacggctgggacttactttaaaggctgttccctgtggataggaacaaacaggatgcagaaaactggaagtaagttccctgcaccacgggggattctgtctcctttcttgtctctccagattttatttttctgatgacaaacgtaataaatgccataattttaaaggtttaatacaggaaagaactgaaaaggagacacagcagatgctgacacgctgggaaatttcctcccgtgctctgttctgtgcacagctgcagcagcccccgaatgccacactgcagaccatgcctctgccacgcgccaccgtgcgtgctgtgcggccaccccagctctcctgcctcctctgtgttttttttgagggcattagttagctggtaagatctttgcaccacaggtggtttttgtccctctacccttctccatttgattttttttttcttattgtaaaaatcatagataatactgggcgtgtaaaatggtgcagctgctttggaaaacggtctgccagctcctcaaatggttaaacctaaagtcacccaacccctccccacccccgaccccaccaattccactgccagggatacacccaggaaaaatgagaacaggtccctgcaaaatctcacacaccaatgttcattgcagtatttgtcacaatggccaaacggtggcaacaacccaaatgcacatcaaatgatgaccggataaacaaaacgtggtctatccatacagtggaatactcagtcatagaaaggaatgaaattctgatacacactgtaacatggatgacccttggaaacacgaaagaagccggttacacagggtcacacgtatgattccgttcccaggaaagcccagcatagagaaatctatagagacgggaagtataccagtggctgcttagggctgggggagggggaggggagtcaggagggtaatagctcaagaatacaggatttctttttgactgtagtgatggttgcagaactctgtgacatactaaaaccactgaattgtaggccgggcgcggtggctcacgcctgtaatcccagcactttggaaggcctaggcgggcagatcacctgaagtcaggagttcaagaccagcctggccaacatggtgaaaccccgtatctactaaaaatacaaaaattagccaggtatgggggcacacatctgtaatcccagctacttgggtggctgaggcacgagaattgcccaggaggcagaggttgctgtgagccaagatcacaccactgcattccagcctgggcaacagagggagactctgtcttggaatgagaataagaaaagtgctcataataaaacattttaggaagtccagaaatgcatcttaaaagggggggaagtctcctattatccccaaggagagggatagaagtcttgatgaccgagatacccagcaaagcaggagctgtgagcatgttaaggaagggagggaagatcttacccaaggggagataacaggagtcttccctgcccaactcacagccctgcatcttcctccctgcaatgacctcctccccatccataggcaaggacaccaccttcttccagcagcaagtctgtctagacccttggacctgtgagagtctctcttccttttgtaccttctttttttttttttttttttgagatggagtctcactctgtcgcccagactggagtgcagtggcacgatctcggctcactacaagttccgcctcccgggttcacgccattctcctgcctcagcctcttgagtagctgggactacaggcgcccgccaccacgcccggctaattttttttttgtattttcagtggaaacggggtttcactgtgttagccaggatggtctcaatctcctgacctcatgatctgcccgtctcggcctcccaaagtgctaggattacaggcgtgagccacctcgcccggccccttttgcaccttctaagcattcacttactattcacaattctccacaagcaaaatctattttctttcttttccagtctccccattcggaacatctgtgtgctccatgatgaccagagccaaggatctcaccgtgggaatctcccattgtctctaacacggggctgggcacctaacaggtgctcactaagcacacattgatttttagaagggaaaaaagtacatgtcacctaaaccagaagaaaatcccccaatcatggatatttggatttggagtatatgtttatgattacagttgccttttggaacaaactatagtaccaggctaggggaattgtcttgtctcttctttcttttctcttttttttttgtgagatggggtcttgctcagtcacccaggctggagtacagtggcgtgatctcagcttgctgcaatctctgcctcctgggttcaaatgattctcatgcctcagcctcctgagtagctgggactacaggcacttgccaccacgcccagctaatttttgtatttttagtacagacagggttttaccatgttggcaaggctggtcttgaactcctgacctcaagcaatccgcccgcctcagcctcctacattgctgggattacagccatgagccactgcaccaggccttgtctattctttttttcttaagtttgtgatcagattcctacttccccagggaggaggggaataatgttccttaactggctgagtcagtgccatgctagactgcggctgccggccacatgtggctgtttacatttatactaaaattacttgaaatgaaataaaatttaaaatgcagctcctcggctgcactagccatatctcgggtgctcatgagccacaaggctgggggctgctggactggatggtgcagagaccgcttccatcactgcagaaagctctttgagcccagtggttctcaagcaggggcaatctaccccacctcccctgggcacatgtggcaatgtccagagaccccgcgactggagcgggtgctgtggcatgtagagggtgggggccagggatgcagctgaatatcctataatgcataaggtaggcccccacaacaaagaatggtccatccccaaatgttaatagtgctgagattgagaatcctgtcctggcctcctgtggttcagcctagctgggcaagcagaggaggccgtagaaggaagtaagggaaaataattttacttaggaataaaaatataggctgggcacagtggctcacgcctataatcccagtactttgggaggctgaggcaggaggattgcttgagcctcggagttcaagaccagcctgggcaacatggtgagacttctttaccaaaaaataaaaaaattagctgggtgtggtggcacacacctgtagttgatctcagcactttgggaggctgaggcgagaggatcacttgaccccaggagatcgaggttgcagtgagtcatgatcgcactccagcctgggaaacagagcaagactttgtctcaaaaaaaaaaaaaacaaaccaaaaaactataaacaaagagatgcaacaataaacaaaatgtgctacattcatacaatgaaatattattcatccttaaaaagtaaggacattttgggccgggtgtggtggctcacgcctgtaatcccaacactttgggaggctgaggtgggcggatcacctgaggtcagaagttggagaccagcctggtcaacgtggtgaaaccctgtctgtactaaaaatacaaaaaaaaattagccaggtgtggtggcgtgtgcctataatcccagctacttgagaggctgaggcaggagaatcgcttgaacctgggaagcggaggttgcagtgagccgagatagtgccattgcaccccagcctgggaaatagagcgagactctgtctcaaaaacaaaaaaaagagtaaggaaattctgatgtatgctgtaacgtgaacgaaccttgaaaacatgatgctactgaaataagccagacagagaggacaaacactgcagggttccacccatgtgaggcccctggagtagtcaaatccacagagacagaaagtaaaatggaggtgggccaaggctgaggaagagagaagggggagttagtgtttaacggggacggagttttggtttgggaagatgtggagacagatggtggtgatggttgcacaatagcgaatgtatctaatgccactgaagtgtacacttgaaaatggttggccgggcgcggtggctcgcgcctgtaatcctgccactttgggaggccgaggtgggtggatcacctgaggtcaggagttcgagaccagcctgaccaacacggtagaaccccatctctactaaaaatacaaaaattagctgggcgtggtggcgtgtgcctgtaatcccaactactcgggaggctgaggcaggagaatcgcttgaacccaggaggtggaggttgcagtaagccaagatcgcaccactgcactccagcctgggcgacagagcgacactctgtctcaaaaaaaaagaaagaaagaaagaaagaaagaaagaaaatggttaattaacatggctacattttgttacgtattattttaccacaataaaaaaaggagacagatgaatgaataagtcaagcaggtctcgtgcatagtatccacagatgttacgcgagcttttggccctcccgacggcagaaagggtttctctgccctgcatgtctccagcatcccgcactcgcctcccttttaggaacaaaaggcaaaaatgctcccttttttttgtccaccaatctcaaatttcccaggaaattggcaggtagtgaacattcactagcattctctgacgggaagtggccgagagggctccgtaccctgcctcactgttcctcagctactccgcctccccaccccccgagcctgggaaacgagccctggaccgcgtctaggaacagccccacttctgtgccagcctccggctgatggccccactcatacacacctgcaatgagatattccttctttcctccaacgtccagcgagaccccacacactgccgaggagggggccgtgtagataaactctatatccttctcaggccctttgaacatctggaaagacaaggaggaggacatgtaagcagagggaggccacacagttggtgaattccgttcccatccagaacaccctgggcggcacaacctgtagctggggtacagccagcacccaagaggaccaggaagtgcaaatacatgggttaggaaaagaccgttccagctgggctcagggctcatggctgtagtcccagcactttgggaggctgaggtgggcaggtcgcttgaggtcaggagtttgagaccagcctggccaacgtagcaaaaccctgtttctactaaaaatacaaaaattagctgagcatggtggcaagcgcctgtaatcccagctatgtgggaggctgaggcaggagaatcgcttgaacctgcgaggtggaggttgcagtgagctgagatggcgccactgtactcctacctgtatgacagagtaagactccgtcaaaaaaaaaaaaaaaaaaaaagaaaagaaaaagacttcttatagcaaagtgattctttggagtcactcaacttttagtgtggcagatcacagcaggtgagcacaagactcatctgtgccgggcgaagtggctcacaccagtaatcccagcactttgggaggccgaggcaggcagatcacgaggtcagaagatcgacaccatcctggctaacatggtgaaaccctgtctctactaaaaatacagaaatttagctgggcgtggtggcgggcgcctgtagtcccagctactcgggaggctgaggcaggagaatggcgtgaacccaggaggcggagcttgcagtgagccatgatcgtgccactgcgctccagcctgggagacagcaagactccatctcaaaaaaaaaaaaaaagactgtcatctggagcatgacatcctcagacaacacctctgttccctcaccccccaccccaaagaggtcatttctgaatctatggggaggggcttttgtacctccacgtgactctggaccaccatgaaggaccatgacttttgcatatttccaggaattttttatttttttgagatagggtctcactctgttgctcaggctggggctgcaacctcaacttcccaggctcaagtgatcctcccacctcagcctcccgagtagctgggactataggcgcatgccaccatgcttggcttttttttttttttaattagcagagacgaggtctcgctctattacccaggctggtctcaaactcctgagctcaagcaatcctcctgcctcggcctcccaaagttctgggattacaggcataagtcactccacccaacctatatttccaggaattttggtcaaatattgtctacttgatggcaatgagagcagagaggcacctcaggaattaggacataactccatgggccagaagagtttgctttctcaacatgtgatttactcacagcctttcaggaacgcacctgctgcccaggtgaagaatggcattttctcagcactcagggaggctgtttttttccccccgaagagtttcaataagcaaacccaaatggaatggaagcatgcctgatgtcatgacaaatggcttgagagtgacactccagcttgtaccaggaaaggttatgttgatgctgtactaaatgacatcatttgccaaaaggctaaaagcatttcctgggcactggcactggccttttcacgacccctttatgaggtcgtaagagcagatcctctttcctgcttcgtaaagaaagagactcaggcactgagagactaggtcatccccttaaactgacatacatgtgatgatgaagcattccactgaccttctgataacattgattttcagctacttttttttttttctttttttgagatggagtttcgctcttgtcgcacaggctggaatgcagtggtgcaatctcagctcacggcaacctctgcctcccaggtttaagtgttctcctgcctcagcctcccaagtagctgggatcacaggcactcgccaccacgcccagctaatttttgtatttttagtagatacatggggtttctccatgttggccaggctggtcttgaactcctgacttcaggtgatccactcacctgggactatactcatgagacactgtgcctggtttactttttatttttaatgacaaaattaaatatcgatgactacaactaccaccatatcacacggctgtccctccacctgcgacatgaattttcgtctctcttacagaccatgttagttactgtcaatgacaatagcatcacctctcctgccccaggccaggccctgccctccctgccctccctgccacatattttttttttttttttttaatacaagctctcactctgtcacccaggctggaatacagtggtgagatgtctcactgcaacctctgcctcctgggcttaagcgattctcccacctcagcctcccgaatagctgggaccacaggtgggcgctaccatgcctggctggttttttgtagagatggattttcaccatgttgcccagactggtcttgaactcctgagctcaagtgatccgcccacctcggcctcccgaagtgctgggattacaggtgtgagccgcaacgcccggacaggtttctgaaggaattgaatttgtggggagcatgtcatctccacacaacttttcaggcattcgaggattaagggaaatcggatctatttgcagcttgatgacctcatcctctgctctagtccacaggtggccagatcgtgttccagggacccaggctctctgccaaccccaacaccccacagctgtgcccacagtgcagcccgggatgccggcagccactattacctttatctgcttgatctcatactggatcctcttgatagggttgccataaatgtcgtttccagagtccacttccttctcactgaccgctttggccctgatcactgcaaaacacaagacacagaggtgaggagagttcctgaaacacgctcctggggctaaggagagggataagacgtccaggcctgcgggaggtgctggggggttacagacagcagcaaggtgcgagacgggcaaggggcatggtgatcccagcccccggcatggcgtctcctcctccaggctgagagatgatgcccagcctcctcctcctccttccacgattcttcaacaagaatcccttctttgttgacaggggcccaagccagaagcccagagtcccttgtgaccaaggcagtttctgtaacagtgggaggcagtcattgatttgactgaagctcatctgttgatatcatgcttgagtgcttttggctttttttttccttctctccagtgggtactcactggtggctggggcaagcaggtaccccatggaactgacccacaatcccacacattccgcgaaggatgggacatttccccaccctccagccacggcctattggaaacaagcttttctgggctgagggcagagggggagttatccaccttaaaggggccttaaacgtacccggcatatttagctttgggggtcttacatctggaaaggtctatccagctcttctcatctttcctgacctggaaaatgttctatgagtaatttttgttgttgttgttattgagatggagtctcgcgctgttgcccaggctggagtgcagtggcaccgttttggctcactgcaacctctatctcccaggttcaagtgattctcctgcctcagcctctcaagtagctgggattacaggcgtctgtcaccacgcccggttaattttttttttttttcagacggagtctcactctgtcgtccaggctagagtgcagtggcatgatcttggctcactgcaacttctgcctcctgggttcaagaaattctcctgcctcagcttctcaagtagctctgattataggcagctgccaccacacccagctaatttttgtatttttagtagagaaagcgtttcgccatgttggccaggctggtcttgagctcctgacctcaggtgatccacctgcctcagcctcccaaagtgctgggattataggcatgagctacagtgcccaaccttaatttttgtatttttagtagagacagggtttcatcatgttggccaggctgttctcgaactcctgacttcaaatgatccacctgcttcggcctcccaaagtgctgagattacaggcgtgagccactgcgcccagcctgggtgattctttacagtaacacagagtctatcaggggcacaacaggggcaggggcaggaagtttcacccaaaggagacatcggcaggcacagctggcagacccaagggacagatgctgaggaaggacaaacagaaggaaagaggatcccaactaagccccaaccaaacagaaaggagttggggaagaggctgggctggggcaattccagaatattctggagcctgaggttgctgacaggccatgcaacacagggctttctcctagcaattaagccaggattctgttccactcctggtaacctgaggacaagcagatcagtagttcatgctgtcacttgggcagggttgggtagagccctccctttcttaatttcaaggccattagttggtgacatggtctgttttaatggctttaaaagctttgccctcccaaactcagctcttcagggtcactctgggtaagtgttatgttacggtggatatgagcaaaacagagaggtaaggagcagaccacgccaggctccaggcagcctcctagccccagccccagccccaccccacgtggtcggctcaaatctcttagaaccccttaggcagggctgtctcttcccacaggggcaaggaggctcaggcgtgtgggtgctccatctgtgtccatccccctgggccccaccaatgctctctggatcccaggctggcatcagagtcccacaccacagccccactgcctcgcctgggcacaaacccctttcttctttcttcttctgttggagctgagtcatgactggccaaggccacaggttcctgtttcccaggctaatccatgcctcatcctgaaaagccacatctaggaaatgtctcccggcaggccactccagaacagacggctttgccctgacggccccctatttccagtgccctcctaaccatcctctcatccaccgcaaccagctgtctttttttattcacgttcgtttctgctcaaacatcatccttggctgccccctgccctcccctaaaatatgagcgcctttgcaacctgaagtcagccaggggcctcagctgctgtgcccaacaccccccacccatgctcccactattctaccacttcataatacttgtctgccctgaacacgcccaggtgcatccacacctctgaacagacaagtttctttctttcttttttttttagacagagtcttgctctgtcatccccacccctgctaggctggagtgcagtggcgcaatctcagccatctcccaggttcaaatgactctcctgccttagcttcccaggtagctgggattacaggtgggcaccaccatgcctggctaattaccatatatatttttttgagacggagtttcacttttgtcacccaggctggagtgcaatggcttgatctcagctcactgcaacctccacctcccaggttcaagcaattctcctgcctcagcctcctgagtagctggggttacaggtaactgccaccttgccaggctaattttttttttttttggtatttttagtagagacagggttttagcatgttggccaggctggtctcgaactcctgacctcaagtgatccgcccactttggcctcccaaagtgctgggattacaggtgtgagccaccacacccagcctgaacaggcaagtttcttccgccccaaatgccatctcccctctctgcctggagaacttttcttcattcttcaagacccagctaaaatagcccttttctgtcttcctctgggaaatcctgtccttctgcagcacttggtatattccccatctcttttccatcctgctgtcagttcctgcacacctgtctgctcagggccctgggaggtcctaacaggttgaggctagattctgactgcagaacagttggtgctcactaactctttgccagatggagctgagatgacgctgacaactttgggctggtggcccaggtgcagtttgtccttggctctcttgctccctgcctaatctatataccttacgacaatgctgcaccaaaaatgtttatgcaaattagtcaatgtgccagattaacttggtcaaagtttgctcttcatgtagcagagtcaccagctcacaagcaaaccagggccaggcacggtggctcactcctataatcccagcacttcgggaggccgaggcgggcggatcacttgaggtcaggagtttgagaccagcctagccaacatggtgaaaccccatctctacaaaaaatacaaaaatcccagccacttgggaggctgaggcaggagaatcgcttgaacccaggaggtgaaagttgcagtgagctgagatcatgccactgcactccagcctgggcaacagagtgagactccgtcttttaaaaaaagaaaagaaagaaaaggaaaaaaagcaagccagcagaatccaaaggaatcaacagttccagtaggagcagcaagccggcctttattacagtctgctgaattctgtatgttattttggaaatttctggagctgcttttcttttctttctttcttttttttttttttgagatggagtctagctctgtcatccaggctggagtgcaatggtgcaatcttggcccactgcaacctccgcctcctgggttcaagcaattctcctgcctcagcctcccaagtagctgggattacaggcacgcgccaccatgcccggctaattttttgtatttattttagtagagacggggtttcaccatgctggccaggatggtcttgaactcctgacctcgtgatccgcctgcctcggcctcccaacgtgctgggattacaggcatgagctaccgcgcccggccttggagctgcctttcaatggtccactaagccgcacaatgcttaacgcacaataggcactcaacaagcatgtcactggagttcagaaaataagcaaagattacttcaaaacggccaaaatgttgcatcctaccatgggcattgaggttcacatgctgttctcttacaaaaacgcctaaggctcccaggtggcagctgggcacttatttgaaggaggcagcaagagacagagatcctgcattcacccctggatggctgcgtgatctttgagaagctccttgacttcactgagccacagttgttcacacctaagacagagacgatgacaacagtcttgacacttcacaaggtcgtggtgactgttagaggggctggtgtggaggctgcggtgcccgggaactaatgcgtgtacagttcaggaccacgagcatcgcatagacaagcagggcgaattctcccgctcccgtgggtgagggattgggacggtggcatcatgccactcaggtacacagacccggtcctggtcagcaggccacagactctcgatttgatgcagcttcccagcgtgctagctttgcctgggggctgcagattacacactttccttctttaaagtgtcagaaaagaggaggctggtcaaatcaagggtccagggtagccacgtggggttaggactagaaagtgaactggcgaggaggccgccagatgcctgcagggaagtgggggtgaggggcagggaagtgggggtgaggggcctggaggagcagagcctgagggcatctccatctcccctgggctgctttagtctgcccctggggaacagaattcagattcttcagggtccctttaaattgggggtgggcacctcctcccccactttgcaaaatgagaaattacatgaaagaaggaaaatgggaatcaagagaggcaaagaaggaccagttccacggcaaccttccccaaagcaccagcacgccgcagacatgaaggagaggggccagctgacagctctgatcggtgcacaccagttggcatagcgggatctgcaccgctgacctgctcagagcagcgggtacctgtcgggggttgttgcccagaggtgacagcaggtgaagagagggtacagggtgaatcctgcatacagcaggccttgcctgggaggagcatccaatccaggcaagatgacagacgatggataggaacacagagaaggagagtttccaatgcccagtggtggacagaggaggagggagagagagctctccggaatacatttccatgccaatggcaatggtccgcactctgagctccaggatggaccaccagttctgtaggggaaagcaggccacttcaaaagagggagggcctctccgagtcccaggccatgtgaagaacagggctggggaaagcgaagagacataaggaatctgggaagaaatgaaaattgtggcacagacacgtttactgaacacctactgggtgctgggcctggtgttaggcactggggtgggtgtcagcccatctcctgtccatgcccccgagaggggctgctctgctcctctgccccttccccaaggagccagaggcagctgcgagagggggagtctttataaagactctcgttctaactgccctgagcccagaaaccacggcctctccctgggcgtctcagatttcgtttttccttctttcccttctgctgtgaacacaacatctgggtttgagatcaagggtgatacactggctgatgaattcaccgccagatgccggctactggaatgtacaaccgtcggctgaattcaaagcacacgcaactgcagggtccccacccccacccctccagcccaggacaccatatgatgtcacttcccccctgcaaaaacaatcccgagcgcacccgccagagtggggacggaaaagaaccgggtgggcggaaaaccaaggtcgcgggagacgatccaaagaggatgggctacggtcagacttcgacagtcacaaccgcccctggaaaaccatcagaggccggaccggctgctgctgctctcggaggggagcagacagtgaagggggcttgctggagaacctggtgtcaccagcatgtgccagggccaagggctggccggaggggcggcactctccacagactccaaccacgccagccccaggcagagacgccacggcttctgtggcacggtcctcccttgttctctctcctcggtgtcccctctgctgccatcaacacgtgggtcctgcgtcctcacgtccccttcatacacccaccaacatctttccaatcctcctgtgtccacagaagtactatggaagttcctgcggaaaataagaacaagccatgcccacaattgggggagggagacagaccccaaaagaaaattgcctcgaaaggccgggtgcagtggctcacacttgtaatcccagcacttgggaggccaaggtggatgggttgcttgaagctaggagttcaagaccagcctgagcaacatagcaatacctcatctataaaaaacaaaatacaaaaaacaaaaacaaaaaaaaacaaaaattagctgggcgtggtggcatctgcctatagtcccagctactcaggagaattgtatgaactagatgttcaaggctgcagtgagctatgaatgcaccactgcacctcggtcctgggtgaaagaaccagaccctgcctttgaaagaaaaagaaaattgcctgtaagaaatgtacttattccacactcattgaattctctttattatcttgccaggggcccaactgctcgctggaggaatcccacatgctatatgtataaatataccatatagaacattttccacttgagccactctgccgggctcccaggcccaagtttgggacaggcaaaccggtggatatcaacacccaacgtctagaccactcacagcctctccccggggcactccacacactgtaacagcatagcgcctgtctcggctacgggacgtgctcaggcagcgggagaaggtggcccactgtccctcaaagtcacctgtctgcccagacgaggtgcagggatccctgggactcagaaacacattcggctgctaaatacaaagtcaaaacccggcccgatcatctgcaccttgtgtgcacactgactcggactgggagggtttgctcagtatcactggagggcactggcccctcccagccgtccaccctcttctgcaggctccagctttcacctggggaggggcgcccataggaccagcactggcagggaaagcgcctccttcccctctgtcctgtcctgcttatggcccagcggagaacgccaaggggtccccatgttctcaacatgggtcattcctgggagtcgggtgggggcttcacacatgtgccaaagaccctactggcccacatcactagtgggtggggggcattctgatgctgcagctgggtcagagtcagcccagagcacccacagtggcaatgaagaccagtggccactgcatgcatcccaggggccagccctggaggactccacactgcgtagacgcaaacgcggtaactgcaggccggagccgcagacgtcttctgagcgtcatttggttcatttggctctgggtggaattacatgccagtcatttcagaggaattatcaaagaaaccattttctctcccggatgaaacccaacctccacttactcctggggaggatccaatggcagttgcaggtggactcagctttgttctttcactgggaaaggactgtgacgttccacgccttgtctaaactctccagaaaagtggggtgccatgagtgccaatgtccacaccctcaaatcacacagttagtaacgcccttgctaacatctgtaactataacttggcgttgccattggggatgagagtctcttgtcccttttgggtggatgtaatgacaccatatggctggtcaacctggcaggggctccatatcctcttttttttttgagatagagtttcgctcttgtcgcccaggctggaatgcaatggcacgacgttggctcactgcaacctcggcctcctgggttcaagcgattctcctgcctcagcctctggagtagctgggattacaggtgcccgccaccatgcccggctgatttttattttgtgtatttttagtagagatggggtttcaccatgttggccaggctggtcttgaactcctgacctcacgtgatccacccatcttggcctcccagagtgctgggattacaggcgtgagccacctggcccggcctgaccattttgattaatatgtctaaagcgccagctgagggtgtaccaggggcccctctgccccagccacccacaagatcagagtctgaaaagggaggtgaagcccactttccccacttctggtgtctacaccctcagctcaggacagatgtccagtaacacagctgtggccctgccctgcaactgctgtaataaatgactatttttcatggccctgctctcagatcgctgtgggatccctaaatgtttgtgtgtaactaatctcgttgggcttcaggatcacagtaaagacagcttagaaacatggaagctctccattcgggcagcacctccttcttttagcaggatggggccgacctcgccagctggagcagcagaagtggccacaaacgccaccagggatggcagacggtgatccaggaaggggctgtgctcacaaggaccccagacctgctctagtcctctaggtttggaggccacgcctctcccaacggaactgcccaggggcacggggcaaggctgagcagccaggaagtgtcacaagtgttgtgaggtgacagtgagggttagctggtccagctcaccttcagcctctggcctcaagtgacacagccgggtgcccttggtgggcagtcagagggtctcccccgggcactgggctctgcccttcctcggccccttcatgccagccccttttggtcagcgggtgcggcagacctcctccaaattcactccttttagggaaatgagcagaaaagagggccgtgacttggtaattaaaaacagccctgtggtgctgggcaggaaccaggctcttcccgccctgcagctgctgtggaggccagacccaccctcaggtcctccaacctcctcggcccccggaagccagcaacggggccttctgggaagcaggaaagacctcagcagagggggcaccataggagcacactggacatccgtccccagttgagggtgtagacaccggaagtgaagacatggggcaccacctccctttccagactctgaccttgagagtttgtgggtggctgggacagagaggccccaggtccaccctcagtggtgacttgcagccctggtgcagggcgggaccgtgacatccagggtgaggacagaggacttggccagcatgactcaggccagggtgaaaaacgcctggaatgacaactactcagaaaagatattttgttggggagggtgcggaggagggtggggcagagaaggtaacagggtgcacaacagagatcagggaacagaagcgcagcctcagccggggccacaccgcctgccagcgggcacctgggggtgctccaggccctgccgccccagggaatgctccctccccggctgcctgagattctagtgcacgtgagctgctggccactgggtgcccgtctccatggagaccagctctcccatctcacttcctgcccattcgttttggctcctcttgggaaacagcatctatcagagcacctcagccacgcagagcaaagccgccctctctgcccagccttcctgccgccctccccaaccccagggccctgccccctccctctgcagctctgggaggacctcggggcccacgtcccgctgccctccctttccctggtgggccagcaggtctcatgccagagcctccggctcggcccttcccattcacgtgctgctgaatcacttgaaaacaatgcaccagaccccgggaggatttgctgagaacagtgcggctttgtggagggaagtgcagctctgcattttctccgtcaagacccacggaacagccaagctcagccctgcaaaccctaagccagagccggagcagggacaggagcaggaccgtgcagggcaggaggcagagggagcctggagaggcaccgaggaaacccctacccatccctgcaacccgcccccctacaacagatgagcagggggccagggtgacaactccggagccaggggcagcagcagattctctcctcgcactgttgctggggggctgcgacagcgcgaggtgggcagggcactgttcctcccaagccgatccatttttggggacgaacgtgaggtccgggcccaggcttcaggctcattggcactgactgtctttgagccctggctgttcgtcggacccagggtcatgtggcctgtgggctgagcctgacttgctgcatttctcaggagacagaaacagggacatgaaggacatgaaggctggaatcccagggtccacacacccaggaaagaatgaaagcaggggggctgaggtccccactcccctttcccttcctcctcagcacagcttcccaaacaagccccatgctgagcggcgcccccagactccctaagcttgtcctggggggtgtgcatctgtgtagccccgtctccagctggaggacttggcctgggctgtcacagcagctgcaagtgcaggctgcaccccagccctccgccccgtgtcttcttggagatctcgatataacccccttgccatttgcacgaactggaagaatgaccacaggtcagggagggtgctctacccacccgtccactctaaaaaccctatttccttttgtcttatgtgtcggagatcctggtcacacagggcttgaaggggaagggagatttgtgcggagagaagatggacgccccagggcagctctcagggtggggtcacatccaaagcccaactggccagcaggttgggggggagcaggccaggaggtgaacaggtagcacctgccagaccctgctggcccccctcagcccatggacagctgacctcggcagaaagcacaagcaacgctgctgctccccgtccaagcctcacggaccaacagggcgacccacgcaccactgctcagccacggaggccttcctgggtccctgtggtttggggagaaggacccacaaggcagggagcaaagatggggccggaggacgaaggttccagcaaatgcagagtgaggcgcgaacacggaatctgtcccccaagggtgggggcagaagcaccaaaccagagcagagctctagaaggtgcaaagtgttcggagcaggagaaccgtgcggggtacctggaagtgccttaggatgaaggtgaacacggccaccacatctgggatcctcaccgctgctggcatggcagtgctctctggaaacctcaggagccccacacccttccgggtggctccatcccttgttttacagtcaaatgaaggctgggcaagggctggggtgtgagtccagggggcacccctgagcccgccaacatagccctatgaggtgcctggcacttcggggaggatttaggctcgcaaggcagggggcaggccctgtgcacttgtgtccggaagagaggtggtgggaagagagatgctggaagctgggtgtgaggggtgtgaggggtgtgaggggcaggaggtggagggccaggccttggaggaagtgcagaaaccttaacactctgcccaggtcacctagctgctggcaaatggcagagccagggctccaaccccggcagtagggctctcaccagctcctggtggaggctctgggtggaggcatgggacggggtgagccaggggaagctggaggctgctccacagccctttctaccgcagtccagctgtgccaaggtgaccaaggggggaggggaacacaggcactgccaggccctgggatggaaagttactcatgacatctccgtaagaatcactggagggccatggttttgggtgtggacatcctggagggctgttttagtgcccacaccaatgccctagttaaagaaccaccctgtccccttagccttctgcaggacaggtgggaaagggccgggtgtctggtcctgctgccaggggacagtgcaggtgtgaccgtccgggcagagatgagtcaccctccacactgtcttgctgcccgtctccacgcctagttttagctcgtgtggtcaagaaggggcgattcctcacctagaacacatgggtcacaaatgctacctttgaaaatggaaacaaaaataacccactcaaaggcaggctggttcccccatcagactgtggcttccaggctaaggcaggaagacctcggctactcaatgtttgggccccattgtggccatggcttttaactcagtcatgccataacaccctctctgccctctcagacagaggtgatgctacactgacaggcggctacgctccaggtctccgtgtgcaaaaaatagctgggcacaaggcaagtgcagaaacagcaggagcacggtgacaccccaccccgagaaatctatgtggcttttgaaaaacagcagccctcctgacccccagtttccttcttaatcatgttgagcctatagcaaattgtggagtggctttgcaaccctagcccatgacattctggaagcagaggatagaaagaaaccaggctaagatcaaaattttcttcttctttttttttccccctaagacagggtctctgtcactgaagctggagtgcagcggcgcaatcacagctcactgcagcctcgacctcccaggttcaagagatcatcccacctcagcctccctagtagctggaactataggtgcacgccagtatgcctggctactttttgtttttatagagacacaatctcactatgttgcccaggctggtctcatattcctgggctcaagccatccacctgctttggcctcccagagtgctgggattacaggtgtgagccaccatgcccagcctcgaatttcctctacttggcctgaagcagaaagccacagacaacagagacctaagctactaatgattaaagaacccaaaagcaaaaacaaaagagtcttgtgggatgctactcccgccccgtccaaatgagcgtaacgcttgttggttccacgagcttcgcattcgccagggaagtccggcttgagtttctcagaggcgtgcacttggggtcccactgagcaccttgtcctgcacagccatagttccagcttttactcactcatcatctgcgtcctccaccagaacgggagtcctgtggttccatgtgtgtggctcactgctcatctctagtgactgggacagtgtctaggactcatatctgtaaatttatttatttattttgagatggagtctccctctgtccccaggctggagtgcagtggcatgatctcagctcactgcaacctccgcctcctgggttcaagcgattctcctgcctcagcctcccgaatagctgggactacaagtgcgcgccgccacgcccggctaatttccgtatttttagtagagacggggtttcaccctgttggccaggctggcctcgaactcatgacctcaagtgatccacctgcctcggcctctcacagtgctgggattacaggtatgagcaaacgcgcccagcctcatatttgtaaattaaatattttataagagcaggtcaatctttttctggggaaaaaaaaaaaaataggaaaaaaaaaaaaagagcaataaacgggatctttcccacacctacatcccagctgtgccaaaagcactttttgacacccggtcctttgattcaaatgcatcagagatatagtcctctttttggaaacaagcacgaaactggagaagctatgatcctggaaagaagctcatacacgcgatgaggatatgctgcagtgaaaatgagtaagaggcgtttgtgtgatgtggatgaattcagtaaccgtgccgaggccaaaaaacctagctttcaaaagactccacataatatcctttttataaagttcaaaaccaagtaaaactaaacactatgtttagcatacatatatggataaagatagggagggctaaaccccaagttcagcaggtatatatctttttgtttcttttttttttttttccttttttgagatggagtctcgctctgacacccaggctggagtgcagtggcgcaatcttggctcactgcaacctccacctcccggattcaagcaattctcctgcctcagcctcctgagtagctgggattacagatgccaccaccacgcccggctaattttttgtatttttagtagagacagcgtttcacagtgttgaccaggctgttctcaaactcctgacctcaagcaatccgcccgccttggcctcccaacgtgctgggattacaggtgtgagccaccgcgtccagtatctttttgtttctgagacagggtctcgctctgtcacccaggctggcagtggcgtgatcacagctccctgtgcggcctcagtctctggggctcaaatgaacctcttgcctcagcctcacgagtagctgggactgtaggtgcaggccgctatgctcagctaattttttattttttgtaggatagggtctccccatgttgcccacgctggtctcgaattcctgggctcaagtgatcctcctgcgctggcttcccaaaatgttgggattgtaggtgtgagccatcagcaggtatatgtccaaggaggcagcagggggatggaaaagggaggtagcgcacaggtagtgaatattctgggtcttgggtctgggtgatgggctcatggtacttcattatattgtctacaaaatatacataagtaaggccattcgtggaccaatgatactaatgtgtcatgaacaaagattggttgatctaagtcaatgtatctgaggttgttggaagggagggagagagacagactctgaaaccatcctagtacagggatcagcaaactatggcacaaagggcagatgccgctcaccacctatttttgtagagtctcattggaacctggccacgccctttcatttacatctcatctgtggctgcttctgagcagctgcagtagagctgggtaattaccacgggggctgcacagctggcaaaggctaaaatatttactctctggctctttgcagaaaaagtatgttgatccctgtgcctgtccctaagactgcaattggcagaagagaagctacccagtgtgaggtctccatggctctggtggatgccaggtcagtggcaaagctagcggggaggaaactgatcaaacacccaggtgccgacacccttgccagccccagagggaatcacccagcggggcgagggtggcttgtcttctcttttccgtctactctcttttctcttaaagttataagaatgtattaagcgacgtgctatttaaacaatgttggttttgttgtgactttgaaagactaagaggttttagctttggttcaatctccgttaatgtctcagccttggctaagcactaagtgatctatctcctgaaattgtgcccgtctgaccttgggtgcccctgaaaggccagtgtttatttggctaaaacatctgaagggcttaaatgacctggagtctccatctgtgcctgtggcccctgaaaacagactgtcacccaggctggaatgtagtgacatgatcggctctgggagatgcatccacagcacatgggctagacacacccactgaaacccacacgggttcctatttttgtatataggtggtttcccaaaagggacttcgttttaaaggcaagactaggccaggcgcggtggctcaagtctgtaatcccagcactttgggaggccaaggcaggcggatcacgagatcaggagttcaagaccagcctagccaacatggtgaaaccctgtgtctattaaaaatacaaaaaattagccaggcatggtggcaggcgcctataatcccagctactcgggaggctgaggcaggagaattgcttaagcccaggagacagaggtactgagtcgagactgcaccactgcactctagcctgggcaacagagcaagactccgtctcaatcaatcaatcaatcaataaaggcaagattagggaaagagtccctgtgagggaatgtgccctggaggacggtataatgacagattgctttttttttttttttttgagacgagtctcactctgtcacccaggctggagtacagtggtgcaatctcgactcactgcaacctccgcctcccaggttcaagtgattctcctgcctcaatttcctgagtagctgaggttacaggcacatgccatcacacccagctaatttttatatttttagtaaaaacggggtttcgccatgttggccaggctggtctcaaactcctgacctcaggtgatcctgaggccgacctcggcctcccaaagtgctgggattacaggcgtgcgccactgcacccggccccagattgcccattttaaagaggcctaatagtctctgaggcaatgacgcaaacacagatcttagagacccgggtaccagtgctggcagcaccattatcagtgatgtatttaccccgggtgggcctctcgcatttagcatatgttctgaaactcccgcaagcatttccgggcttcttcaagaaactgcttgtgcaacctgttttgctgtaagatctgctgctgctggtctcggatcatctgactgtgccggtcgtcgtcggcgaggctggtgcccgatggggaagtggtgctgagctcagatcctctctccctttcctgggctctcgtggaggaggacttcagatgggccagtcgagctcttctttgctccctcctctctttttctagctcagctttgtagtggatttccaagctcatatctgggtgttccatttgttcaagcgattccagttgtttttgtcttctctgctccatctctgctttctgcctttgcctggatgccgtcgagcccactctgtctgcctggtcttgaaggtggagctgaagggagccctctgccagcgtgcccagtttgggggtctcttgtccagattcagtgctatacaataatgagtcctctttgttgataaatatacctgcctcgggagacaatgtttgacttccatttctaaacgtgggcttgaccgtgccctgatatttttggttctgggccttgcccatgaacgttttcaagtcggtcttggacgctgcctgctgcgcctcctcctctgctgggctcctgggttccccggcaggcagcatctctgggtctgccattttcttccctcttggggtcccagcgccacactcttgcatctctgagaaggcatgcccttccccaggtctctggtccatcctgggcttcagtgccaggtacaagcacaggtgttttttcagctttctgtttatattaaacaactcttcaaaggccaactccagctctttctgccacttgttcttctcccggagcgtgcactgagatgctggggacacggcttcccttctgcagctggaatcagctggccacagctgcccgaggtctctcagcttcccctccagactctgtccctgagagcgactggtcagggctggaacaaagcaaactgccccctttcccagttgcctcctccccgcccgagctgttcctttctctttttcctccacaagcccgatttctcccacagcagccacgagtgggtttgacctttctaggtccgcccctttgctcctccgaggatggatggcacagcggccacccccagacttggtcgaaggttctggccttccctttctcttctcaggcggggccaggtgagaattcatccgacccgtggcttttgtagtctgtggtttctctggactcgctgctgtcttccggggcctggagtgcctggggtgttgctggcccaactcttccctgcaactcctctcttcactaagggctgctctatgcttctccttggccctcgggggcctggctgatcttcgctggatgggcccctgcgagtcaggctcattttccctggcccgtcctcctccccagcccaacagacgtgctgactgcagcctgtccaggccaccgacgtgcaggtgctgtgcctcctgataccctctcctcaactcctcagccaagcgctggagctggtagtttttccacagcttggcatccgctcttctctgcagagcgagatcgcctttgccccgggcttgtagcaatttgtgctttttcctccaaagcaggtcttcgttatcaggacagaggctcagccacatggctccatccatgtttctgttcctgtctgcgaacccagcagatacagcttcccagggaaggtgcttggagccaagagtggagggttcaaggggcgcccccgggcctgaggagccacagaagccacaacgttccacagcaaacctacgaggaagggagcacaagtgcagctttccagatcgctcccaggagagtgagcaaagccctggagacaagcacacgggattctcactgtgaggacaggctgcaaaatgtgcccctccaagctctcttgacccgtgcccaccagggcccactctcagcctcccaatttctgtcctgtacacttttgacaagagcctgtagggcagctgttttgaacagagtgtggtgttgtttcccaggggacattggcaatgtctggaaacattttctattgtcacaaatgcagggaggaggtgctccgggcctgcagctgggtggaggcgagggaggctgctgaataccccacactgcacaggagggctgcccaagacagtgaataacctggccagagatgtcagtagtgccgagactgacaatcccacccaaagggcaagggttaggattcaggtagggatggaggggcacaaagggcagcccttggaaacaaatattgagaagagcaggtggaagtaaaagaggaagtctgggcctctggagggagaattgatcgtaaaggaaaggaggaagagacggggcagggaggagcctgccaagcatgtgtgtgtgcaggagtgtgtgcacgcgtgtgcaggggtgtgtgtgggtgtgtgcacatgcacatgtgtgtgcaggggtgtgtgtgcgtacatgtgtgtgcaggggtgtgtgtgcatacatgtgtgtgcaggggtgtgtgcaaggatgtgtgtgcatgtgtgtgcaggggtgtgtgtgcatgtgtgtgtaggagtgtgtgtgcaggggtgtgtgtgtaggggtgtgcgggcaagggtgtgtgtgcaggggtgtatgtgcaagggtgtgtgtgtctccatgcatgtgtgtgcaggggtgtgtgtgcaggggtgtgtaggagtgtgtgtgcaggggtgtgtatgcaggggtgtgtgtgcataggggtgtgtgtgcaggggtgtgtgcgtggggctgtgtgtgcaggggtgtgtgtgcatagcggtgtgtgtgcaggggtgtgtgcgcgcaggggtgtgtgcgtgtgcacatctgtttatgtttctgtgcacatgcctgcacatctgtgtgtacaggggggtgtacaggtgtgtgtatgtatgcatgtctgtgtgtgcctctgtgtgcatgtcggtgtgtgtatgtgtatgtgtccgtgtggggcatgcaggtatgtatgtgtgcatgcaagtctgatacttgaatccagtagaaaccagagaggaggagaagctggtgttagctctctcttcatgactcccagctctttccttttataatgatcagagaaggactcttccaggtctctttggcatcaggaagggacccatgctttggcaggccttcctaggaaaggaggggcatttacaccaaaacagtacgggattgtgtctgttgccacgggtagctgatgccagaaacagccagatctgtgagctgcaggaaaggctaagggacagccacagtcgatatggagtccccctccactgctccttcccttctttcatcttagtctatgtggaaccaggctaagcctttggagtcaaacgtagttgcagctgaagtcacatgtagttgcaggagtcagaaaatactgcatctacattacagctaacattaaccgtgcaggctcccctctgagcactgggcatgtatccgttcatcttttttacagtaatcctttgagatacgaagctcctaccccccccggttcacagacagggaaactgaggcaggcagagatgaagatgcttaacccagatcacacagctggtaagtggcagagacaggccctctgctgcttggacgaaccccagcacctttgaccaacctcaggtggtcacactgcagctggctttgacttaagtcttctagtgggaggtccttgcacctcttggtaaatcagatcacacaattagaatagtggttaatattatatttagccagatctgccaaccaccatgatgatcaagagagaaagggagagagaaagctgggcccttcaatgcaatgattgagatttttgacaaaggtgccacggcaatttaatgtggggaaagaatagtttttttgtttttcaacaaatgatgctggcacagttggatatccacaggcaaaaaatgggaattcacagccttatctcaccctatatacaaaaattaactcacaatggatcatagaccttcatctacaactataaacgcttagaagaaaacgtaggtgtatattcatgaccttgagtcaggcaaagatttcttagatacaacaccaaaagcacaaccaataaacaaagaaacggataagctgaacatcatcaaaattaaaagaaaaaaaaaacctttgtgcttcaaaaggtaccataagtaaagtgaaaatacaaggtacggactggaaggaaatatttgcaaatcatatatccaacagaagacttgaatccagaacatatgaacacctcttactacccagtaagatggcaaataatcccatttgaaaatcagcaaaagaaggacaggtgtggcagctcacacctgtaatcccagcacactgggaggctgaggcgggcggatcacttgaggtcaggagttcgaaagcagcctaaccaacatggtgaaaccccgtctctactaaaaatacaaaaattagccgggtgtggtggtacgcacctataatcccagctactcgggaagctaaggcaggagaattgcttgtatctgggaggcagaggttgcaatgagctgagattgcaccattgcactccagcctggatgacagagtgagattctgtctcaaaaataaataaataaaaataaaaatcagcaacagatttaaatagatatttcaccaaagaacatagatgtgtggctaatacagcacataaaaacatgttcaacggcagcggtctttagagaaatgcacactgaccctgcagtgtcctgccacctcacatccactccaacggctgtcgtcaaaaagacagacaatagcaactgtcagtgaggaaggagggggaggaattggaaccctgtgcacgctgctggtgggaatggaaaatggtgcagccactttggaaaacagtctggcagtttcttaaaaagggaaacacagacttaccctatgacccagagattccactcctaggtctataaccaagagaaggcctgagtccacaaaaagaaaccaaagctcagagaggttgaataactttcccagctcacatggaggagttggcctcagacaccaaagaccaccaggaacggccacagggatgtccaattaggtgtggtgaggtcggggctgctgtgaatgcccctctgtgtgtctcggaaggtgcctggaggccccaaggttcacagtctatttctgtgccaagagccgttggctcacaccccttgtcaaccaacaattagtaaaacctggacaagtcttccctgctctggaagtgcccccagcccgttcaatgacctcagtgcaccccgtgccagccccactggcgtgggcatcccaatgaagcagcgtcagttttcctggagacacgcaaacgggtaaaaacttaacacatttgggcagagatctttgggataagtctagaaaattgcagccagctccatccttcaggaatcgatccccgctctgacaccatcagatgcaacctcgtccccgctaccccagctctccttgctctcccctctgagaccctccccacttactaacttgaggcagagggcagggtctcacgtggacttgtgcaggcactggcagggaaagcaacagagccttagctgagcccaagatgaccaaggagaaacagccgttcacctgttgcacagcctgctgggatgcctgcctctgcctgtgatgcccaggctgatctccaggcagcccagtgtctctccagccctgccagacaggacgtcgggtgcccttggcaggacacttgccaatgaagacagccatggttccaatcagggccctcgctacagctcccctcccagaggcacctgccctctctggttgcttagaatattctagaaggggcaggggtcctggcgctcctctgtcctccacatcctctgagtgttctgagcatcctgggctgctttggtgttttctactcccctgctgccctctggtcctgccaccccgagctgacaagcctgccttctgctggctgccttcaaccactcagagaaaccacagctcccccctccgcagaagccgcgctcggagcagcagaaggaaggcgagtggacaccaatctggcctccggacggcaccagggcctcccacagagcggagtggacactgggcccattctcctctcttgctctctacagccccgtggccccagcgcaggagccagcccatggcagctccaccccagaccgatccgatcccagcacctgggcccaggaatgtgcttggccaccagattcccagcgattctcaccaaagtcaggcaacctctggcctacagcttgagaatgacgtccaagcagctcgcctttccctgggcggccgctcagacagcttttcagccaaggcagacctcacccagggaccctccacccaggcagcgtggaagtgccagggcccacagacagcacccccccgccccccgccggcctcctcaccccctccgaaggagactccaggcctgctgtgcactcctgtggcatcggggggcggggggcaagcatcacagtcatagggagtgtgaggcgcccagaatgggggctccacagtcaggcctgcaccccggctgcaggataccagatcctgtggttcactgtgagacctccgcctctctcgtctgcctcacgctgccccctcgcacccccaaggtatgacggcatttgaacaatgcacgtgcccatctagagccttggggtgggcctgtgagagagtggccgcccaccccagtccccaccaggtgcatagtcctgcggctaagtcagggcggttgtaacaaaggctcagaccctccaactaccaggctgtgttgtgacgaggctgctggagccccaggcaccatgacgggaatgggtgaatccacccacagtgggtgactctcaatgtgatactagcccggtacacttagacacccaaaaatcaacgcggcagacgttgtatccccaggagaaggacccccccgaacagacacgtgggacaatggcaagcatggccatccctgaggacaatggcaggacccagagtgcctctctcctcctcaaggcatgaactggcccctccagatacagggacaaccttttcttcccacctcggcctgtaacagacacgacacaggccatacccttggctagagtcactgcaacatgatccagagggtgactgtgaaaggagccagcggggctgctgtgtcggttttcctggagacacggaaatgggtacaaacttaaaacatctgggcagaggtctttgggataaagtccagaaaatcacagctggctccatcattcaggaattgatttcccccatgacaccatcggatgcaaccttgtccctgccgcctccagctctccttgatttcccctctgagctcacaaaaagaaacaaaagctcagagaggctgaataactttcccagcttacacggaggagctgggtttgaatccagacatcacactgatcagcacgcagacccgcagggtttcatactcttccggcatttcacgtacacctctctccatctcaccgcctcaccataggaggtgaggcctattcctatccgcacaatctgacagggaaattgagactcagagaggttaagtaacttgcctaaggccacatagctcgtaatcagggcagcagggattccgggccgagcaggcaggcccctgatccaggctcctagcctgctgcccagggaggtcagagctggaaaccacttccacagcacaaggagactctgcttggactgtgcttggcctcacgtgacctctgacctccctggccctcctgtgaccctgacaggtgtgctgagcttctgaagggtgggaaggcctgcaaggggcctgcgtgcattctgtgtgcatcgacccaggacaccacggttggtgcctctgagttcatcacgtcgatcatccccatcttctttctgctcaagtacttgatttgtcaacatgcacagaagggtgagacctggccatggtgctgcttgaatcttgttaacagttaggctctgattcaatagtctgggtggggcccaagactctgcatttctttttcttttcttttttcttttttgagacggagtcttgctctgttgcccaggctggagtgcagtggtgcaatctcagctcactgcaacctccccctcctgggttcatgcaattctcttgcctcagcctcccaagtagctgggactataggcacgcgccaccatgcctggctaatttttgtatttttagtagagatagggtttcaccatgccggccaggctggtctcaaactcctgacctcaagtgatctgcccgccttggcctcccaaagtgctgggattccaggcatgagcccccgcacccgccagactctgcatctctaaagtgctgggattccgggtgtgagcccccacgcccgccagactctgcatctctaaagcgctcccagggatgctgatgctgccatctgggggaccacgcttggagtactgcggccctggcaaaccatctcttccaggaagctgcatcttgctctgccttcctcccctgccagcagctcagccctgatcatctctcacctgaggcccttaaaagcctcccaatcagcctctctgcccccgacccccaggcctgcaccccgtcctctcccgcactgcagcccagcgctgtctaactgagagacctgggttacatttcagcatcccccatgtgattccctgctgtccacaccagcaagtctctgagtgcaacccgcagccacgtgcatcataatcagctgagctgctggtgaaggggtagattcctgggcctcacccctgacagatcctatcccagcccctgcgggaggggcccaggaatgcagccagttcaccagctgccctgccaaagcctggcaatctctgggcctagaggcttgagaacggtcaagcagctcgccctggctcccctgggagccaccctagcctggaacgctgcacaccagacaggggtggtagagctcctggccattcccaaatgccccacacccagcagcgcctggaatgtgctcatgcaggttcctcgtgacatggacacacccccttccccatcctacccgcatgtccccagcccaggcctcgttcccactcccccaggatgccccaaccctccaagggaacaaagagaatgctcttccctttctccagaagcccagcacccgggccacatagtcaagcgctttgtctttgaaacataaaaatagctatagaagggctccgttagctggcatcggccagagagagaacatttccatataattagagcttaccctttcatatggaaagttagacatttctctgtctaaggcgcctacgtagaatatgtaatttgaccttctttgggggaaattttggattgtctttgggatgataatataggaaatccctcgagggcttttaaaatgtaaagaacagaggtcccataaactaagtgaccccagaatgcaatttgggttttttaagtcgcctttttagagcttcctgtgtcctcccttccctggtcataactgtctgacagcagccacacaaacaagcttattaaaattgtggtttttttggccgggcgcggtggctcacgcctgtaatcccagcactttgggaggctgaggtggctggatcacctcacgacaggagttcgagaccagcctgaccaacgtggtgaaacctcgtctctactaaatacaaaaaattagccaggtgtggtggtatatgcctgtaatcccagctactcaggaggctgaggcaggagaatcacttgaacccaggaggcggaggttgcagtgagccaagatcgcaccactgtactctagcctaggcaacagagcaagactccatttcaaaaaaaaaaaaaaatgtgttttttaataaagtaagtagagtccgaggtggtggtgggctcttccacaggaccactgcctgagctttcacacctgaccttatcaattcaaagctgtgggcatccccggatacagataacccttgggggaggtggaaaattgttgctagactctagcctagaggtttttaacagcttgcacaactggccaaatcttacaagataaaaaaaggtaatgggaacacatctaaaacttatatgtgggtccctaaatccaactatgcaagtacagaggtgggtgtgtggagcagcacaggggacaaaagacgctgggccaccagaagggccaacgtgactgtcccctgagtgaacagaaacgcctctaacatgcgagcgaatggtgcagcccagccagcccgacctcacctggccatgctaggaggcagtgggcaagcggcaacgctgtggtgcccaggacgccggcaggcacagcgccacgtccacgggcaccgcccgttcccaccctgcaggacgccacagcatcagacgagacggcccgtgtgaagcgccgagaacagagtctggcttccgggagggctcaggaaatgccgagagctcggcagagacacccacgtggtgctggattccacgcacgaggaaccgacgggcagacgtggagctaaatgatggtcaacagctacgaagtgcctgtgctctagaaatggccaatttgatcatgtcacgggataaagtttcaaaatcaataaaaccgtgatgaaatgatcaggaataaacctgtccagaactgttcaagacctaaaggagatgcacgggctgaagaacaaggagcaaatctgaacgagggagaggtgtgtcttcctggacagttctcgggagaggaggagggcggtaaggacggggagaagaggccgcaggcttggagtccaggaggagaatgaactcctttggtcaggaggggcccactgaccaaaggtcctaggaagaaaagccaaaggaggtgaggtggggcaagggtgtttgcaaaggatagaaaagtctagaatggcagagtatggtgcttaagagtactatgtgacctaggccaagcgacttcactctgggtgcctcagtttgctctttaggatggggatgataacaacagcagcacccatctacagagatgccagtgcttgtcaccacgagaagcacctgaaatgcttggggaagaggggtggtacttactgtgtgtgtctccagatgactgagctagaccacccagaacacattacagggaggcagaagctgacaggagggcaggaagcactgtctccagggctgtcttgaaatcactgggctgactttgtaggtagtgagacgcccatcactggaggcatccgaaccaagcccagataaaacaaacatcagaaacatttttaactccgtttctctgagttctagcctctaaaaataccctccatgacacgctgtgtgctgccagaggcttggttttcgccctcttctccccaactcttagccacgtcccagtggtggcggggggacgggggtcccaagccactgcactgggttttggtttcactatgttgcccaggctggagtgcagtggtgcgatctcagcttactgcaacctccaccttccgggttcaagcaattctcctgtctcagccttcccaagtagctgggactacaggcgcacgccaccacacccagctaatttttgtatttttagtagagacggggattcaccatattggtcagactggttacaaactcctgacctcaggtgatccactcgcctcggcctcccaaagtgctgggattccaggcatgagccaccatgcccagcctgcactgggttttggactggctgtgttagcatcacctggggcaggggtgggtcacgttagaatgagtcctggctaggcccacagcaggcttttccacccgaatactggggccacagctcatgaatctgtgtgtatccatatcctgggctgggtcagctctccagggtggagatggttgggcaggcagcctctgggggcaagctcgggctcaggcctccccttgaccagcttcacagagacagacactgaggcagactgacctccaaactcccagctgagacgccagctccccacgtggggggcttacagctgatgcaaccggtggctcactaaacatacctcgacagcgtccattaccgcttccctgcaaacctcaagatcctaagcacccagcctaggtcaggggtccccaatcccagcaggtgttcctgcttcctgaagaccccccagcccaactcctccaacaaccatattcatctccaacccagtcccaccagcttccctcactctccttcccatcacactgcctgtggggagccccgtggtgcagggactttgccgctggccttgcgaacccacggcttggagcccctccttggcccactctccggggccctcttgggagcctcgctaaacagctgggcatggaaagaaccccaccctcaccacagatgggaacagacacagagagcctcagccccgcagtggtctcaggggcccactgaccaaaggtggccggaatcgcttccccgcctccacctgcagcccggcctctgccctggctggctactcatagcaggctgttgccatgggaacagcagagctgttgagctgtgacatcatggcaggggtgaggtcagggacagctgtgagccagccagggggcaagcgtgtaggttaggggatcaatcataaagatttggctcaagcagccgggagccatgggggcacctgaaggcactgtttaaggaggtgtgggtgaacaaggacagtgcaatgtacaaatgctcgtggccataccaggcagaggacatctttttgtccccagctggctgcatggagacctcccagggtgtcattctctctgagctgtcaggccattaaggaggtacacttcaaggtcagggttcctgacaacgcctgccatcccttctcctgtagggacagcatctgttcacgcttctaaacagctccagaaagccatcgttaaactgaaacccactggaggcgggggaagaaagaatcccgtcaaccacctgcccacacaggaggagaagccacacgtacttggcctcgtttgagggctagttccccacagacagtttgatcagaaggatgggcgagggaagctggcagggcgaggctggggatgaacatgggacactgggggagtctggccggtgcagggggtttccaggaagcaggagtagctgctggaaatgggggcccctgacctagtctgggtggttggcatcttaaggtctgtggtaaagtgatgactggcattgtcaagatatgttttttgtttgttttttagacagtcttgctctgttgcccaggctggagtacggtggcgcaatctcggctcactgcaacctctgcctcccgggttcagggattctagtgcctcagctttctgagtagctgggactacaggtgcatgccaccatgcccagctaatttatgtgtgtgtgtgtgtgttttagcagagacggggttttaccatgttggctaggcgggtcttgaactcctgacctcaagcgattcccctgcctcgacctcccaaagtgctaggattataggcacgagccaccgcccccagcccaagatatgttttagtaagccgccagttggatcatctgtaagcaactcactagaagcttccagcatcctccacaaatttgacaactgagaaatgtggctgggaaatcatgatttgggtccgaagaagtgaaagcaacaatcctcaggttgttgtttcttgagagaagaaggtaaacagcaggaattcggctgaggtgtccaaatctcggggaggatgaattctcaggagagctgaacctgagacaaagccctttgtcctgggctggaaggaccctggaaaggttatctggtccctgactcagggaagggaggcattctccctgcaggaatgttctcgatcacagtccaccaccacccccctacccccgcccacttttggagtccatcttcgcagcccttgatgattcattttatgtcagcttgacgggctaagggatgctcagatagctgggaaaacgtgatttctgggtggctctgggaagagactggcatctgaaccgggggactgagtaagaagatccctcctcgccaggtggggcaccatcactcaatctgttgaaagcccggacagaacaaagagacagaggcagaggcaggcaaaccctccctctgcaagagctgggacatccaggctgggcgcggtggctcacgcctgtaatcccagcactttgggaggccgaggcaggtggatcacctgagctcaagagtttgagaccaggccaacatggtgaaaccccatctctactaaaaatacaaaaatgacccgggcgtggtggcgcacacctacagtcccagctactcaggaggctaaggcaggagaatcgcttgaaccagggaagtgaaggttgcagtgagccgaaatcgcaccactgaactccaacctgagcaacaaagtgagactccatctcaaaaaaaaaaagagagagagctgggacatccaccttctttctgccttggacctcagagctcctgggcctcaggcctttgggctccaggacttaccccagtggccaccccgcttctcaggctttgagactcaggctgcattactgcaccagtgaccctgctgctccagctcacagacagcagattccaggacctcccagccttcatacttgcatgagtcaattcccacataaatcccatcttacgcagctggatggagcctattggttctgtttctctgggaaaccctaatacggacccatagatacaaaatcttctatatgcttcttcctcggagaagatccctacatcttttatcctctcagcgtggccttgacgcccattctaaagcaaggggagaggttctagtgaggaggaaatagcatggggaccaacaggatggcacgctaggccttcgatggcccttgcagaatgtccagcacgactgccaagtgctcgtcaggtcttttctggactgaggacatctctctcaagcctgggctctcctgacgctgccttggcaagctctagaaggcagccccatcctctggattaatccgccctgctaaatgttctctctggcatgggattcactactggcctaaggccaactcagccttgagagtctgggtccatactattgttgactgcaattagaaccacatattagcaaatgctagcttttaaaaattacaggtacaggcagacctcagacatactgcgggttgagttcccacagaatcataataaagtgaatattgaaataaagtgagtcacatgactcttttggtttcccaaaccaatatatattcccaaatataaatgttatgtttacattgtacagtagcccagtaagtgtgcaataacattatgtcttatcaatgcacataccttaatttacaaatactttattggccggggcagtggctcacgcctgtcatcccagcactttaggaagccaaggcaggtagatggcttgaccccaggagtttcagaccagccaggcaacacagtgagatcctacctctataaaaaactaaaaatagccaggcatagtggtgcgtacctgcagtcccagctactcaggaggctgaggcaggaggatggcttaagcccagaagttcgaggctgcagtgagctaagatcatgccactgcactccagcctgagtgacagagcaaggtcctgcctcaaaaaaaagaaaaacccaaaacttgaagaaataaaaataaaaataaaaatattttattgcttgaaaatgctaacaatcatctcgacctagtgagtccagtctttttgctggtggagggtcttgcctccatgttgatggctgctgactgatcagggtggtggttgctgaagattggggttggctgtggcaatttcttttttttccttttcttttttatttttattattttttttgagacagagtctcgctctgttgcccaggctggagtacagtggtgcgatctcggctcactgcaacctccatctcccgggttcacgcgattcttgtgcctcagcctcccgagtagctgggattacaggcctgcgccaccacacctggctaatttttgtatttttggtagagacggggttttaccatgttggccaggctggtcttgaactcctgacctcaggtgatccccccgcctcagcctcccaaagtgctgggattacaggcgtgagccaccgtgtctggccggcaggcccactttcttattatttgtgtgatcacctggagtagcattttttaatttccttcacattcacaacttggctgtttggcacaaaaggcctagctgtcagcctaccttggctttcaacacgccttcctcactaagcttaatcactcctagcttttgatttaaagtaagagacgtctcgctctgtctgtcaagcttgaatgcaatggtgtgatctcggctcactgcagcctagaactctcaggctcaagtgatcctcccgcctcagcctcctgagtagctaggactacaggcatgtgccaccacacccagctaagttctttaattttttgtggagatggggtcttgtcgtgttgcccaggctggtctcgaactcctggcctcaaggtgatcctcccgcctcagcctcccaaagtgctggaattacaggcatgagtccccacgcccagtcccattatagggtaattaattggcctaatttcaatattgttgtgtctcaggaaagagggaggcctaggcagagagagagagaccagaagccgccagtcggccagttggtggagtcgtctgaacacagacaacatggatcaattaactttgccatctcatgtgggcacagttcatggtgccccaaaacaattacaacagtaacgccaaagaccactgatcacagatcaccataacaggtatgataataatgaaaaagtttgaaatattgcaagaattattaaaatgggacacaaacacatgaagtgaacacgtgatgtgagaaaaaaatggcaccgatagactcagagttgagccagccgtgatattcaattcatgaaaacgcagtatctgcagagcacaatatagcgaagtccagtaaaacaggtgcacccatggaattcatgttcattctagagcaactggaaaatacacccttgccaaagaaagtctaatgtcccctcatgtgtccaaacgttctggccaggtgtggtggctcacgtctgtagtcccggcactctgggaggccgaggtgggaggatcacttgagctcaggagtttgagaccggcctgaacaacatggcgaaaccccatctgtactaaaaatacaaaaacttagctgggcatagtggtgtgtgtctgtggtcccagctacttgggaggctgaggtgggaggattgcttcagcccagggagcagaggttgcagcgagtggagatcgcaccactgcactccagcctgggtgacaaagcgagacactgtctcaaaaacaaaaaagaaaagaaaaagctataccatgtgatgtctgcagagcatctgatgctgtgatttatttaaccacgcccctgctactgtatatataggtgtttctaacgtttccgtaagataagcaagacggagatgaatatccttcagctaaatacttccatgtgtcctaaattatttctctcagaaaaactccaagatatagggctgcctgatcaaagggaagacttatttttaaagtccttgatcactgctgccaaaatgcccttccatgcctctaaactactcaaattaaggcaaaatatacctgtcaccaaggccttctgaggacaacatgcctcttggccaaaaggagcaaagtgatgttaaatccaaagctgtgaaatctaatcttcttcccagagactcgagccaggatcattccccttggattcctggcactgccactctgtgggtgaccttgggcaagtcatcggctgctccccatccaaacacctgcctcacctcccccgcagagcctttgtaaataaggaagatgtgaagtcctttgtgctgaaaagccctcgacagtatttttatgcatttgcctggttgttttatccctgctttccagaactagtgcacagaagggaagaccaccacagactgttcctttattccctgccctggagccaactgggccaagtggacaagacctcacaagggagagtcaggccagcaatgctcatcccagctccaccctgaccccattcctcttggcatactcagtttctgcctgggctgggcaggctggtccttggcttctggggtcagctcaggattgaggatgaaatgagaggagcacccccagaagagaaagtgctgaaccagaagcccaggagagtcatgtgtgtgcgtgtccatctaagcctttgccccaaaacagtaggtaggtcaggtgcagtggctcatgcctgaaatcttagcactttgggaggctgagatgagaggatcacttgaacccaggagttcgagaccagactgggcaacatagcaagatctggtttctaaacacaaaagtaattttaaaaattagccaagcgtggtggcacacacctgcaatcccagctactcgggaggctgaagtgggaggactgcttgagcccaggtggttaaagctacagtgagctaggatcacgccactgcactccagcctgggcgacagagcaagaccctcatctctttaaaaaaaaaaaagataaatcaaggagcccacctgtccccagagctctcctgccacagtgtcagcacatgccttctgagcataataatccccccggacctgaagcccacgaatgacccccccacccagtcctttctccctcatgtcacgtcaagtgctgtgtcactgaagcaccccgtaccccatcacctggtgccagaggcctggccatggtgcagctggacccccagctgcccgtgtgaccgtgggcaaacggattatgtcaccttcccagtgttagagagacccagtggtgacaaacgtcctctgtacctagggtcaccgtaaggctcgggtctcatcgggtttctgtacatgctctagacgtgcagcgtcatgctaccgacactccaagtagccggccttgctggcactcctggctttctcccttattccaccccccgccccccacaacattacgggacccaggccgggcactgtgacccaggcagtgtggattctcaactagctggagcaaacagggaactagggcacagaaaaggcagagtcacacaaccggaggcggagtgtccgtctagtactgggacccggtgtgatgctttaaggaacacacctgccgtccttatgtgagctgggctgggcctttatttttaatggacacataattgtaatatttatggcatatatagtgatgtttagatacatacaatgtatagtgatcagatcagggtaattagcacagccatcatctcaagcatttctttctttgtggtaggaacattcaatgtcctccgagctatctgaaactatacaatatacttttgttaatttctttttcttttttttttttttgagacacggagtctcgctctgtagcccaggctagagtgtggtggcgtgatctcggctcgctgcaacctccacctcccgggttcaagcgattctcctgcctcagcctcctgagtaactgggatcacaggtacacaccaccaggcctggctaatttttatatttttagtagagacaaggtttcaccattttggccaggctggtctcaaactcctggcctcaggtgatccgcccaccttggcctcccaaagtgttgggattaaaggtgtgggccaccgcctggcctattgttaattacattaatccaacagtgacatggaacactataactcattcctcctatctagctgtaattttgtatcctttaacaaatctctccctctctcctcccccaacccttcccagactctagtattctctgttctacttttgacttcgatgagatcaacttttcttttttttagctttcccatatgagtgagaacatgccatgtttaactttctgttcctggcttatttcacttaacgtcttccagttccattcatgttgctgcaaatgacaagatttcattctgttttatggctgagtagtatttcattgtgtagatgtaccaacatccacaatgaaatactatttcattctttagccattcatctgttgttggacactgaggttgattccatatcttggctattgtgaacagtgctgccaggaccatgggggtgcaggtgtctctctgatgcactgattccctttcctttggataaatgcccagtcgtgggactgctggatcatatggccgttctatttgtagttttttgaggaacctccaccatagtgactgtactactttccattcccacccaccgcatatacgagttcccttttctccccttccttgcctgagctgggcctttctgatcatctgtccccgtcccttgaactcttgatctggactgagggaagaatggtggcagaggcgagctggggagcagggaggaaccaggctgtcgcaggagaaacagaatattgcgagccagccgtgtggaatggaaaggggaagctggtcttcctgccccacactcctgcctttcttccttaagggctccttggacagagactgcaggtttctcagaagcactgtccaggatctcaacattctagaagggtctaggacaaactaactaactattgagcccctccagtgcttttgttgtttttgttttttgttttttgttttttgagacagagtctcactctgtcacccacgctggagtgcagtggcgtgatctcagctcactgcaacctccgcctgggttcaagtgattctcctgcctcagcctcccgagtagctgggattacaggtacccgccaccatgcccagctaattttaaaaatatttttagtagagatggggtttcgccatgttggccaggcttgtttcaaattcctgacctcaagtgatccgcccaccttggcctccaaaagtgctgagattacaggcatgagccaccccacctggcctccatttgactcactcatcaaaaatttaatcttggcagggtgtggtggctcacgcctataatcccaatactttgggaggccatggcgggtggatcacttgaggtcaggagttcaagaccagccaggccaacatggtgaaaccctatctctactaaaaacacaccaaaaaaaaaaaaaaaaaaattgaactgggcatggtggcacacgcctgaaatcccagctactggggaggctgaggcaggagaattgcttgaagccgggagacagaggatgcagtgagccaagattgtgccactgcactccagcctggacaacagagtgagactctgtctcaaaaaaaaaatatgaatctcccatggcaccacactgaagagtctgatcttgcttttacagaagaggaaaccaaggctcagagaggcacacagtcgggattcagaaccagtcccacttgactccaaagcccaggctcttttctccaatacttttcatgtcgcctcttttctctgaaatgtccatttcctcattctgtccttggttaagcagcagctgttggcgggtgctctgtccaggcctccgctaccatgacgagccttggcaaagcctgccccactgccagtttgctttgccacgtctgtgtcaggaaagctcaatcaatctctcccgattacagatcagaaagggccaaataaactctcaacccaagccagattctgtccctgaagatgcagtaagggggtctcggtacccacagaacatcccaccacagaaagccaggctccagcctgaaagtccatcttccctgctctagcccacccgtgcgatgaagagcacagaagaggcgggtgaaggcattgcatcttcagcatcggcttggagaatgacaccctgcaggttccacttcttcccaggccacctgcttgcttctggaaagcagggaacaggcaatccggggagagaggagccagccacacaaggactgggaagcccagacctgtgccatcagcctgcgatgacttaggctggggatccgaaaaggtttctatgaacagccagctggtaagtaatttagactttgaggcccatacagtccttgatcaccgccattcaactctgttgttatagcacaaaagccacgtgggtttggccttaccagtgggcgtggctgtgttccaataaaactttatttgcactaggccaggcaccgtggcacaagcctgtaatcccagtactttgggaggccgaggcgggcagatcacctgaggttgggagttccagaccagcctggccaacatagtgaaaccctgtctctactaaaaatacaaaaattagccgggtgtggtggcaaaaagaaaaaaaaatatttacaacaacaggccatcagcccagcagtgggtctagtttgccaaccgctggaaaaagccaacaacattttgggaggccgactgccggctacaggacctcgccataccaacaagggctgagacccgcggctctgcagggctctaacaacagcgtttgacctgagtctatctggggaaacatcacgtgaacccacgttgaggccctactctggaagctgcaaaattagagatgatggctgtgcggctctgtgaatgtactcaaaccgctgaactgtgcactttagaggagtgacctcatggtatgtgaattacatctcaataaagcagctcaaaagcaggctgggtgcagtggttcacgcttgtaatcccagtgctttgggaggccgaggtgggaagacggcttgagcccaggcgttcaagaccagactgggcaacgtggcaaaacctcgtctcgacaaaaaatgtaaaaattagctgggtgtgctggtatggtcccatagttccagctacttgagaagctgaggtaggaggactgcttaagcccaggaggctgaggctgcagtgagccatgatcatgccactttactccagcctgggtgacagagcaagaacctgtctcagaaaaacaacaacaaaaaaaaacaaaaaacataggccgggcacagtggctcacacctgtaatcccagctactctggaggctgaggcaggagaattgcttaaacccaggaggcggaggttgcagcgaaccaagattgcaccactgcactccagcctgggccacggagcgaaactctgtctcggggaaaaaaaaaaaaaaaaaaaaattctaggcaatggatacaatcaggatgatttttcttgctttttgcttaagtgtcttttccatgattaacacatatagttgtgtaattattttaaagttagaaggcatttgggacgtgaatggagagacagagaagttttctttatgatggagagaggcggaagggacggcttcctctgcgagggtgcaagggctgacctgggagagcaggcagctgcgactaacgctggctggggcctgcctgacttccccttgagtcctcagaggcacaggttataacccaatgttttattgcttcttgagaacattattggcattcatctgccttcgaaattttggctattcatttatttatttatttatttatttatttatttatttgagatggagtctcgctctgtctcccaggctggatggagtacggtggcccgatctcggctcactgcaacctccacctcctgggttcaagtgattctcctgcctcagcctcttgaatagctgggattacaggcacccgccaccatgcccggctaatttttgtatttttagtagagatggggtttcatgatgttggccaggctggtctcgaactcctgacctcaggtgatccacccaccttggcctcccaaagcactgggattacagggatgagctactgcacccagccaagctgttttttttttctttatagacagagtcttgctctgtcccccaggctggtacaaccatagctcactgcagcctcaaactcctgggctccagtgatcctctcacttcagcctcccgagtaggtgggactacaggcacgtgccaccacccctggctaatttttaaaattttaatttattttatgtagagatgaggtcttgctatgttgcctaggctgatctggaactcctgggctcaagtgatcctcccgcctcagcctcccaaagtgctgggattacaggtgtaagccaccgcgcctggccagtctgggctttttctttttttttttttgagacggagtcttgctctgttgcccaggctggcatgcagtggcacgatctcggctcactgcaacctccgcctcccgggttcaagtgattctcctgcctcagcctactgagtagctgggattacaggtgcccgccaccacgcccagctaatttttgtatttttagtagagatggggtttcatgatgttggccaggctggtctcaaactcctgacctcaggtgatccacccacctcagcctcccaaagtgctgggattacaggcgtgagtcactgcaaccggcccagtctgggcttttgaaagtactgtgctctgaacatttttctaggtcataaacacaaatctgtaatatcatttgaaatgtctgctcactctgttgcggcagggagaaagattaattgatttagcttatctccagcagacaggcaaacctcatgaacaaggccagcctcaggagctcctctccctcctcagtggctccatccgtcacctgtagagcttcagcccagctccacagcctagaccattcatccccaagccagtatcagtctgaatcagcaccattctgttgatgtacctccttttaaaagccgtctctctctctttttttcttctttttttttttgagacagagtctcactctgtcacccaggcaggagtgcagtggtgcgatgtcggctcactgcaacctctgcttcccaggttcaagcgattctcatgcctcagcctcccgagtagctgggattacaggcgtgcaccaccacgcccagctaatttttttatttttagtagacatggagtttcaccatgttggcaaggctggtcttgaactcccgacctcaggcgatccacatgcctcggcctccccaagtgctgggattccaggcatgattccaccgtgcccggcctaaaaaccatctcttcttttactctgctatttcctagccagctaaccctgagcaggttccttagtgggcctgtgcctccgttggatcgtctgtacaatggggatgaggatagggaaggaaatgggttgacactagtgaagagcaagaacatacctccaagcccttggcacctctgccagctgttattgttgccatagtcattatcaccatgtcatgattcacctccctggctgctcccaggcctccctcagggcggggtggggaggaacaagaacacaaagacagggagagccagggtttgatgcagaaagagctggtgtcccccactagctccgagagcttcctgggaggcaggaaattcgcctctcctttttggaggtgtggaagtgggggcagagagaggccacctgtcccggatcgctctgctggactcaatctggggccagcatttgacccccgctcaccctgtttgctatgaatgtcagttcccctcgctactgctggctcccttccccctcaatgctccgtttcctgttccctccaaggccccgttacacaatttccactgtctgctgaagttctagctcaaatccctctcgccgagactttctggtcaccagattccagcagaactcaacagagacctctacccgcctgagctcctgaccaggttagagggcatctggctcccaggcactgggtcaagctccagaggcatctcctgtgtctgcccgcgacccatggccccgctcagggcctgccttccatctcctgggtcttccccagtgcaggtgggagctctgctcccctggtaactgcgagcctctcaacaccaccttcctcctcagtgtcatccccctcctgtctgccccctctcccccagtgcaggggccataaagccttccccggagtcccactgccaggtcccactgccgggcctccaggctttgctgctccacctgggctcaagcctggccatactttgttctaatgactctgtccccctgtggtacactctctaccacagccaccctgggctccccatacccaccccaggacctttcctcggggcttatcttagctctgataagatccacccctcagggcccacaatctcaacagtgtcctaacctcggtaagagtctctagcaagaggtgcagcctgcaagatgatcttcgcattcctgcgctcacttccttgaagatgggcaccatggctttggagtttgagaccagcctggccgacagggtgaaaccccgtctctactaaaaatacaaaaaattagccgggcgtagtggcgggcgcctgtagtcccagctacttgggaggctgaggcaggagaatggcgtgaacccaggaggcggagcttgcagtgagccgagatcccgccactgcactccagcctgggcgacagagcgagactccgtctcaaaaaaaaaaaaaaaaaaaaatacaaaaattagctgggcatggcagcacacacctgtaatcccagctactcgggaggctgaggcaggagaattgcttgaacccgggaggcggaggttgcagtgagccaagatcgcaccactgcattccagcctgggcgacagagcaaaactccgtctcagaaaactaaataattccttgacacacttgccatagtatttctgtgtacggtaggcacccaaattctattgtaaaacaaaatataaaaacacttaagtgaataaattctgtaagaagcaggtatctaagacatagacaccaggcccttcctaactggtgaggtctggagttccctcaggccatgtgtggtccagctgtgatcagagtttgagatcaaagagcagctgccgtctaccaaggacgtcttccccatggaagacaaccacagaacctcccaggtctttggagccatccctgagaccagctaggaggccaaaggacactgatggcatcctttccccagagctggttacaggtctgcctcggactcccctcgtggtggtagtgtctgagcggatcctggctgcccagggcggccgagtgcagaatgagggtggaagaggagagaaaggcaagatcgttaccatcgctcagctccgagactaggcagatactcacaagaaacagaagactcgaaacctataaaaagactccttttaaatggcagtgacttgacgtttggagggccacaggcacctttgagaagttggcggctgccactgtccacaaaaaaaacacgtacgcgtgcacacacaaacacacacacacacacacacacacacacacacacaacttcacttacagtttccgggcttgtgaccacccccaaacccgccaggcctatctctggctgggtgttcacacactctgggttaggacccctcttttataaagactgttcctcaatttgcttcttagcgtaaacacactctcaacctgacttgctggggctccggaagctttccctgggctccagtctgacctggctgactggggagtagctcagccctcagttgtaaggtgggaatcatcggggcggggtctctgtgcccttccctctgccgctgcacagccacgtcccagcaaatgcacgagggcaccagggcgtcagggcacaggctgcaggggtccaggcaggtgggccctgggaggtcctggggacaccagcttcatcctgcctgccactctgagacatccatgctcctgaccatctctccattgggaagtctgggtctgcccgccttccctcctcccagcaatctcagggcagctcatctgcctgcttactccaccccccgacactgaggtggtcagcctccacactttctgttcagacccacgggcaacaaaaacaaaaccttggccaagcactcacaatatcagatattcattaaaaaagtatatataggccgggcaccgtggctcacatctgtaatcccagcactttgggaggccaaggtgggcagatcacttgagctcaggagttcgagaccagcctgggcaacatggcgaaaccccatctctacaaaaaattaaaaaaattagctgggcgtggtggctgcttgggagactgaggtgggagaatcgcttgggccaggaaattgaagctgcagtgatctgtgattgcaccactgcactccagcctgggtgacacagcaagactccgtctcaaaaaaaaaaaaaaaaattatatttggagtacaactctgaatccatatgctaactattcataacattcttagcaccgaggctgtactgggcacccctccggagacgactggtctatgccaactttggcgggcggcagcagcacctggagagtcctgaaactccagtgccacccccaggcccgctccagcacgcggagttaggcggctgccttctaccaggctccctgggcaacgcccgctgtcattccacagccagaacatctttggtggctgcgtgggtcccgggatggaatgcagatgtcacatgacaagccagagccgtgacatttggccccaatctccttgtgggtccccctgaatccccaggctcctctttggcctactctgtacccagaactctcacctttcctggggcagttggtcccttggcttagaacacctgtgcacaccccaccctgctgccgctaaatgaccaggggttacggtccccagtgccgtcctccagatgcggcttcttcaccctcccttaccttgatttcttcactctgccctcccctcttgaaaaagaccatctgctgggtgcggtggctcaagcctgtaatctcaacactttgggaggccgaggtgggcggatcacgaggtcaggagatcgagaccatcccggctaacacggtgaaaccccgtctctaataaaaattcaaaaaaattagccgggcatggtggcgggcacctgtagtcccagctactcgggaggctgaggcaggagaatggcgtgaacccgggaggcggagcttgcagtgagccaagatagcgccactgcactccagcctggagacagagtgagactccatctcgaaaaaaaagaaaaagaaaagaagaccatcctagccatgcagccacttgccctccgtccctggtttgtgagcctgtgcgtgcaccgggggacagagagagtgtccagggcatgcacccctcctgcccctgccactgccacgtctgcctgtctttgcttccttcttatctcctcctccctgctgttgcatccctcctcgcagctgcctgggaagcctcgggcagacctctttgttgtttccgaacccaagacgttcacccctacacacgacccccactgcatcgagtcagtggttctgcatcaggactggagacggctgcccgcgcctctcagtctcccaggagtcatctatgccctgttctccatgtgctcagatgtcgccacagagtctgaacctctcagcccacaccagtggcatctacctagcaacctggctgcgacagcagggaggagggaggcagtacccaagcccacctgcagctcacaaacgacaggccaggactgcgtacgtggctctgcacccccagaagggtgcaaataggggaggcccgagaggctctgaggctggcactgtcctcagatcccagatagggagaaacgtgtgttgtccagagagctccttccagcacctgccatacctccaggctgtgcacagctctccctgctcttccagtccccctgccttgggagctgccagtaattcaggggtcagtgactcccctgacagatcctgtccctccaaggacgctgttcaaaaccaagccgaagagcctcagttctccccacagctccctcctcaacctaccatggggccttctatcctcacatcttgcaaatgcatttcacattgtcacatgattactcctgaattttggttatttcgaaagtttatctgttgttaattatttaccgaaaccacactgagtggactgactttataccacacctgggcagttgaggaggggaggcctgctcaccacgccgggcagcaggaacccccttccacaccgcctggtgccaagatgtaccaccccctgcatcccccaccacagggacaatgtcttgcttctcccttacatccccgggggcagaggcagccactccataattgcttgttgaaacacagacaagcccaatatgaaaatcaagatgaacaaaactgacaatacagatcgatcacatacttcgcacaacgagttgccaacagtttctttaaaaagcgccacgccgccccctcgcatggaaggcctgacccagctcacatgaatctgatgctgtgttgcttttcctgagcacgtgtcctgaagacagagccatttttgactgcgtgctgtgtgttttctggggtggcccctactatctgtctggtccctgtcactgtgtcccccaggaaccaggtcacccttggctgttcaccccagaaaatagcagttgttccccctcttggttgtggacccctctctagctggagctggagctcctcgggggatttgcagaggacagtttctggaggtgggaacatgtgaggaagatgtcatcgcagaggtcttctaggataatgtgtggccttaggtactgccacccaagccagaggagaggttttattctctgcatccagagagctcctggctttacccttgagtccagaaacgggcccaagcagcccgagtctgccaagtagctcagctggctaagtggctccaggcatgggactgcctgaatggtgagcccaaagctaatttccagccagatccctgtagctgtgcaggctggcagtagatgtgaaggatttcactgggtgagagggagccgggccagcagcgcatttgaacagtactgtaactgagacacaaaatgcttcccgtttgtgctggccttgctggaaaggacaaggacctggggccttccaggaagaaatcaggtcacctcttaccatcccttatcctaaacatcaccacctcatcatgaattatctttgccgaccacagttccggtcctaccaactgcaagagctgctagggagatacctcccagaaatcctcagccgggcagacagaaatctgactgtttcttaagccaattgcctcttgtagacaccaagccatttaacaaggctgcatgcagccaagagtaaaaggagccagcttgccacataacaagccagcctttattaacctccactgtaccccctttctgagacccctgggtcacagccctggttaaatcacctgtgggccttttaaaactgcaaaagccgaagtctgagcaagaccctctgtatctgcaaagggacctagacctgagcaatctttaagaatcttccaggcaattctgctctgagccagaatggggaaccattgctgagaaagtcacaaacctgcatcgcttcgaggagaatcgaacactggagaatagacaggccgctgtcgtccctgtgggatttgttccgggaccctaccctgggatgtcctgggttgtttatcccaagttggttgagcacggaaagggtgactgggaataagagaaggcagcctggtgtatgggctgaattacgtcccccctcaaatgcacatctagtcagatcctatgaatatgaccttatttggaaatagagtatttgttgatctatcaagatgaagtcatactggattagggtgggccctaaatccaatggctgctgtccttagaagaacagggcaatttggccgggcgcggtggctcacgcctataatcccagcactttgggaggctgaggcaggcggatcacctgaggccaggagttcgagaccagcctggccaacatggcgaattcctgtctctactaaaaatacaaaaaattagccgggtgtggtggcaggtgcctgtaaccccagctacttgggaggctgaggcaggagaattgctcgaacccaggaggcggaggctgcagcgagccgagattgcgccattgcactccagcctgctctccaaaaaaaaagaacagggaaatttggacacagagacacacgagagaaggccatgtgaagacaggcggaaatggaagtgatgtgttccttgaaaatggaaccaagcaacatcaaggagagaggcctggaagagattctccctcacagcccccagaaggaactggctctgtggacaccttttcagacttctggcctcctgagctacagagaatcgattcctgttcttttaagccctcccatttgtggtagtttgtcacagcggccacaggaagcgaatgccctgagctctgcagtgcaactctggcatctgactgggcctctgagccgggatggggtgaaaagttttagctacaggatgattttgatgcaaagatttagacacaaatgccaggcaacccagaagaggagagtgctgcgctgagcatgaaggaggcgggaggcacgcactgcagccctccaccctctgccatcctggatccacaccccacgcagaaacagctcccagctcagtggccgccttaacttatgccaagcaaggacagagtggctgcctggacattctcccacacagctgaggagtgtgtgtgtggggcggggtgggggggggggcgggagggggaggggtcccaaggcccaactcctacaaatccaactcccaggtccttttatccacagcctccttctgggccttggctacatcctgccccagcacgtgctggtgagccaaggagcctggacaggcctgcactcctcgtggacccccagagaaaggcccattatggctccctcatcaaaggaacctctccttcacccacaaatcttgctgagcaccaaggctaaactggagaaaagacctcatttcccccaaactgggttttgtggaaactgacacaggcacacaccaagccttccgcccaggtggcctgagccacctgagacctgtgatctcaatagattggtgcaactgaaaacttccccagctgggcacgcagctcctagggctaaccggggtggggcaagaagccgtgggcggggtatgggaagggcgtggctgacagcaggagaaacagaaagtcccacctccactctgggcaggtgagggggcccccgccttgctccatctgccctggacaggtcactcgactgagactcagacataagaaggaaggagggcagggggctccgagaccacctgccgtgtagccagacttgccccaggaaaaccatgctgaccagcaccagggctgcagaggcttgaggtgcaggaccagggtggaaacttcgagccagcgggttcctcccatttctgctggtcctccccctccatggatcagaacaaataactgggcccctcctgcctccctccatggcgcctgtcttttgggggctaggagtccggaggtcatgggtatttgctggggaatctgagcagcagcacagtcccacgtgccgggtccggtcaccaaagtctccagcttttgtggacgtcccgaaaaagcggaacattcgggggtcccggtccctgcccagccagtttgcagggcctcctgggcagggcgcaagcaaggagccacgccaggagacgccaccggctttttcacctgcccctctgggcctgtggaacctgcctcgggtagggcgggcttccatcccaccctggcttgatcggggagcccccaaatggggctggtgggagaagccccagcagagaagcccttccccacccagccccaagcccagagaagcccaactcccaccttatctgcgaaagtttcttcctggggtccccagtcctccagccccccgcccccacgccgtgtcccccacgctccccgcccccagcgctggcatcccagggcgcgccgcctgccaaaagccaaactggctccctttcctggggctggagctgcggcggaatttcggtggaattttgaggttgagacgcatctcggcaaagagagggaaagaaagggagaggagggaggggggaaagaaagtcggctctgggcgtccacttgcaggattcgagaaggcgccgagggaccaggaggcgggcgctggggtccctcggccagcggcgggcgggcggggcgtctgcgaaccctcggggtcgcgggggaggtggggccccgcgcgggggctggggtcgccgctccttacctacatctgcattgcaaaacgcctgttgcgggtgcaccggggagcagctgcaggcgtcggccgggcgaagcagcgtcgccagcagcaggaggccgagcgccagccgcagggtgcgggccgcggcgcccatggcgggccggggggctgggcgggcgggggccgccgctggggggtccgggcgctgctcgcggcggcgggctgggggcgcgggcgggggctgagccggggccgaggcgggcccctcccgcgcggctcaccctcctcacctgccccgctcggccgcgcaaactttctctcctctttgtctcgggggcgcgaggggaggggcgcggggcgcaattcgccgggcggggcggcggggtggggggcggcgggcgagcggcgctgcggttctcggcggccgcgctgccttctacggatgtgtttgctgcgggcttgggccgggccgcagttttattgcgctcggaggattttctgctcctcctcccggtggctggcggccaatgcaggctctgggcgctcccagcagccccctcctccccctccgcccgcgcctccccccagcccgcgcttttgttgtgcccggcctggcacgtcgggggcttcccgcaccacctggcgcccgcgacccgcacccgcgcgggggtccccggacgcccccagccccccgaccccggtccccgctgcgtggccttctgcgcccggggtccctgactcagcgcgggggactcgcgccccgttcttccaggacaccaggcgacccacccgctaccctttccccttcagctcgactctggagggctacgctgctccgtcccccgccaccccggggtcccttcgagcccagcctcggggcgagccaaggggtgtcctttggagcaggggccgttccctgtcgccacctccccgtttctgtgggcgggtggcctattgagaaactgacaggatccctttttcaaatggaggccttagaattttaagtgcgcctggccagtttagttggggggtggggggtgtggttactgtgaacaaaacaggattttatataaactggccatatttttgaccagccaacaagagacgggggtgggcccaggcgcccaggagccagtaggatcgcagcagaggcattggctgggttccgctcacagtttcctctcttagtccacaaatgtgggagccgaaggacttttcccaaaacagttttgtgttccaggaaagacccaggcatatgaagggatgaacatgtgtagggtggtgaggcgggcttcctggctgtgaacctgcctgtgcccggctgtgggcacccaccctgtacatttggtgtgtgccccgtggggctccatggacactgctgcactcaggtcagcactccagccctcaggtcagcattccagagtgtttgcagtccagctagggagagggaagcccaggaaaatgacacaggaagaatcagggcgggcacggtggcttgcgcctgtaatcccagcactttgggaggccgagacaggaggatcacttgaggccaggagtttgagaccagcctggctagcatttagtagagacagtgaaaccccgtctctactaaaaatacaaaaaattagccgggcttggtggtgggcgcctgtagtcccagctactcgggaggctgaggcaggagaatggcatgaacccaggaggcggagcttgcagtgagccgagatcatgccactgcactccagcctgggggacagagcgagactccatctcaaaagaaaaaaaaaaaaaaaaaaagcccgggtgcagtggctcatgcctgtaatcccagcactttgggaggctgaggtgggcgaatcacgaggtcaggagttcgagaccagcctggcggctaacacggtgaaaccccgtctctattaaaaacacaagaaattagccgggcgtggtggcgcgcgcctgtagtcccagctactcaggaggctgaggcaggagaatcgcttgaacccgagaggcggaggttgcagtgagccgagattgcgccactgcactccagcctgggcgacagagaaagactcttgtttttttttgttttttttttttttttttttaaaaagaattgcccactaaattgtgcggtgctgacttgaggtatgaaactttggaaaatagtgaaagaatggaaaaacagcttctttctgtttgtgtatgttttgtaacagacagttctgagaaaagttaaataagcaatgccgttatttttagcaccctgacaaatccaaagtcacttttttggtttttgttagcgtgaaatagagttgggtcgttcacaaaatgatgtttgaagctaacgtttaaaagtacagttaattcagaaaattgttatgtgctggctgccttcagccatttcatcgttttctttccttctttttggttacagggggaacaaaatgctgttgaacttgtgtttcaatttgtcagttcatgatagaaacaggtagcataggggctctcggtcttttagacaagctctacatataagtgatcaggtacatgttagggtgataaataccttagagcagttgtggtgctgacagccaagggggtggggccaatgtgggatgtacctgggaggaaaggggggcctgggctccagggttggggggcgtgagactggaacttccaacccaaggcctcgcacctgtatcctggactgccctccccgaagtcatccccaccagcacacaaacaggctggaattgctcccaggaaaagtgaagcagaaatcttgccaggtgcagtggctcacgcttgtaatcccaacactttgggaaactaaggtgggaggatcacttgaggccaggagtttgagaccagcctgaggaacatactgagaccccatctctacaaaaaaaaaattagctgggcgtgatggctcacacttgtagtcccagctacagggaagctgcggtgggaggatcgcttgagcctggggaagttgagtctgcagtgagccgagatcacaccactgcactccagccttggtgacagagtgagaccctgtctcaaaaaaaaaaaaaaaaatctctcccctcaattcccccaccagagagtactctacttttctgttccctctaccattatctcctccaaacaggtctctaaaccagaagtttccagctttcttttcctcccttttctcttggttctctctctctccctcctccctccatccatcaacaaatactcatttgagtatctgctgtagcctggacaccgtcctaagagtgagacattcagcgtctacagaacagaggaacatccctggaacagcaggtggaaacacgcaaggccccaaggttggacgatgctggacctggtggagcccatggtgtggcgaggagtgagaggaaggagggctgaggcaggaggccaggagcaggggctgggaggggacacggcggagggcagccaggctaccgggaggatgtgcattttgttctgagtgaggtgggagcctttggagggttctgagcagaggggcaggatcggacgcatcccctggaaggatgggactctggtgggtggcctgggtgggggcagggagcccagtgaaagggcaggtgctggagatgcagagactccagagtcacaaaacccctttctggtgcagtgccgtgaatggctgacctgcggctgcaaagtcagatgaagaggggactgaggtctgagggcccaaatgactctcccaagggcacagcagggaggggagaggacagtcccagcagccaggcctccctcgcagcccacagcccccagcttgctgacccagtcatctccctgctgcttggggccctcagggtcttggctcctgagccagcttctgtctcattaaccaccctccaccttctcttccagttagggtcctcacacttcaaaatcaaggaaactgaggcctcagaccaggaacctactgaagacagggagtagactggaatctggctcatggcagcacaaacccactttttctttcttttttcttttttttctttgtttgagagccggggtctcactctgtcacccagcctggagtgcagtggcttgatctcagctcactgcaacctctgcctcccgggctccagtgatcctcccacctcagcctcctttgtagctgggaccacaggtatgcgccaccacacctggctattttttgtattttttgtagagacacagcttctgcaagctgctccttctccttgtccttctctgtgctttgtggccaagagggcttgaccttgcaagcaaacttgaacatggggagggggctgccacccataagggaagtgacagggtccgcatgccccatgcccagggcaagagaggaaggaggaaggcagaccccgggctgggagctccctccactgcttcactgctttttttttgagacagagttttactctgtctcccgctggagtgcaatggcaccatctcggctcactgcaacctctgcctcctgagctcaagcaattctcatgtctcagcctcctgagtagctgggattacaggtgcccaccatcacacccggctaatttttgtattttaagtagagacagggtttcaccatgttgcccaggctggtctggaactcctgagctcaggtgatccgcccgcctcggcctcccacagtgctgggattacaggcgtgagccaccgcgcccaacccatggcttcactcctaaccagcccccttcacttctcatcttgatattggtgggtggactaccatagggaccataagcgacacccagcccagatgcagcctgggggaccctggcttggatcagcttaagagcagaggctctcagcctctcaggacagacaggagcacgagggagccctgtgaagtatgggggtgatttcagggccctcagaccacgctccaggggccaccgcttcccacgaggaacatcgtcttgctcccccaccccctcaaagagaccttcctggcagagagcacagcagagctgtcaggcgtgtgtgcaccctcgcctgaacacaccaggcgaacacctcccaggctggacctgatgaatcctgtccggggccggaggaagtgccaaggcctcctccctgtcgctcccgtctcaggccaccaggcaggacgccctccctgctgcgccgggctggcgggaggatgctgctcttctcggtggcctcgccctcccagtctggatgagagccatcttcccctgagcaggtcacgttctctctgtggagacagcttgaacggacccgaagcccccacgttctttctggcaggttcctagagagccagatgttctcatccagagacagcatggacgttggccccacacacccgggaaattgaccccctgccgatggctggaactccggccctcaggggagtgtccagggcagtctcaggggcagggagccggcagctgtagaggaaggtggggaccgtgtctgagtctggctgtctgggaggtgacacttcagtcaggtgacacgtggctgtcaagagtctgaggcccggctggatgggcaggcagcccatctgtgcctccccatccagccgggtctcagactcttggtcacaatgggcacccagcccacgtgtccgtccccaacatccactggtggggctgttcaccacaggacatcctgaagatgacaagaaggtgagtcaagagtgatggctgggcgtggtggctcacgcctgtaatcctaacactttgggaggccgaggtgggcagatcacttgaggtcaggagtttgagaccagcctggccaacatggtgacaccccatctttactaaaaatataaaaattagccggaattcacttgaaccagggaggcagaggttgcagtgagccaagatcctgccactgcactccagcctggtcaacagagcaagactcaatctcaaaaaaaaaaaatagagtgactgggacccactgtgcttgagacaagatacacaggcagcatgagcggctcatcgtgttctatggtggacgtgctgaagggcatttcaacatggatttcattagccatcttctttaggggccgggcttctccgccttggcacagttgacatttgggccagatccctctttgtggggggctgtcatgggcactgtagggtgttcagcaccatccctggccggacccactggatgccagcaccctctccaattgcaaccatcaaaaatgtctcaagacattgcaaaacggtcctggttggaaaccactaacaaaccaataaaagtctttggtcctgagcaaagcaaggtgcagagacataggaacaaacaggttctatagagaacaagaatgcagatgggagagtgaaggtccccacagcctggagaccaagacatgcaccatgctgccgacaccgattgtcaggggagagaggccaggcacagaatagaattttttttttcttttttgagacagagtctcgctctgtcgcctaagctggagtacagtggcacaatcttagctcactgcaacctccacctcccgggttcaagcaattctcctgcctcgccttccaagtagctggtattagaggttcccaccaccacgcccggctaatttttgtgtttttagtggtgacggggttttaccatgctggttgggctgatctcgaactcctacctcaagtgatctgcctgcctcggcctccctaaatgctgggcttacaggcatgagccaccgcacctggccgaaaaagattttttataagtgtccatggtatggacacagtgtcttgcacctgtaatctcagaactttgggaggctgaggcaggaggatcacctgacaccaggagtttgagaccagcctgggcaacacagtgagaccccatctcgacaaagaattaaagaaattaggtggtcaaggccaggtgcagtggctcatgcctgtaatcccagcactttgggaggccaaggaagctggatcacttgaggccaggagttccagagcagcctggccaacatagcgaaatcctgtctctactaaaaatacaaaaaattagctgggcatggtagcatgcctgtagtcccagctacccgggaggctgaggcacaagaattacttgaacccaggaggctgagtttgcagtgagccgagatcgtgcctgtacactccagcctgggcgacagagcgatactctgccaaaaaagaaaaggaaaagaaaaagaaagaaagaaattagctgtgcatggtggcatgtgcctgtagtctcagctttttgggaggctgaggcaggaggatcacttgaacccaagagttcaaggctttagtgagctctgattgggtcactgcactccagcctgggcaacagaacaagagcctgactcttaaaaaaaaaatttccataataaacagcatgtataatacttcatatatgtgaagtcaaatatgtgagtggatctagaaagaagtatacaggccaggcacggtggttcacgcctgtaatcctagcacttctggaggccacggcaggaggatcgcttgagcccaggagtttgagaccagccaggacaacatggcgaagccccatctctacaaaaaatacaaaaattagccgggcatgctggcacacgcctgcagttccagctacttggcaggctgaggcaggaggatcactcgaacccaggaggtggaggttgcagtgagccgagatcgtgccagtgcactccagcctgggcgacagagtgagaccctgtctcaaaaaaataaaaaataaaaaaaaagaagcatacaaaggtgttcacagaaaggttagtgggtgcgcctgggcaatgggaactcaggtaggtgggtgtcttctgtcctgttccgtgtggagcaggtaatgtaatattccgatgagggtccggccctgaaatgggcaggcctgggggaaggagcacagatgtttcccaccctttctgtataacactattaaagccttcttggccacagccatcagggtttactttttaaagatcctgctccaccttccagccactcttggttcacgcctccctttggttttcttgtttgcttgtttttgttttgttttttgagacagagtctccctctgttgcccaggctggagtgcagtggcacaatctcggctcactgcaacctctgcctcccaggttcaggcaattctccggcttcggcctcccaagtagctgggactacaagcatgcaccaccacgcccggccttccctttgggttttgtttggcagagtctgttgatctatttcatgccatcccacaggccatctttgagaaggtgggactttggcctctctccgtcacttccatctcctgtcaccccaacctaccgcccctccgcagacaggcacccctcagggcaaaagcagccatgagccagggcacctccctttagcaaacctgcttggattccagcctctgcacaccccttgtgcccggcacaaccttcacagccccaggcagcagccccaaagccagccctgttgccctggtcaagtctctagtgacaccagaaagaaaggaggagaggcagagaggttgtcctggtggtaagcaagaagcccatgacatcactggctctacagactgccacgggtaaacagcttagaccagatgactcaggctgaaagcatatgaacccttcctgcagggaggccgcccggatgcaacagtggtttcacccctgagccgggcagccttggcagaccttgcttcacgtgggctgaaatggcagtgtctctcctctttgtggccaggttttgcctcctctttgactcggaagcatctcctatcctgcaaggacagtttgagcagggcccccgggccctccttccaagaggcttctgcagctgtggacccccaagagtttatgccgctgagctctgctgtctctccccacctgctccccacctgtctgcccccacacctgcgactctggctctcctggatcctcctgtagactggttcctataagcacaaggaggaacatgcgagatgctgggattggatgctctgggcctggggctggtgtttcctcatgcccgggctatttccttttggccctgggcatgcagtcatgtgcttcctttcatgggcgggttggggaccagggccagcgagcagagacggtccccagggcttctccatcactggctctccccaggaagcagcctcagctggcgtgctggggaccggagctggccatgagggaggggtggacagtggaggaaccggctgcccagctcagcagggatttgtggaggctgacttgcatggtttcgggtttgccttgcctggaagcctggccaggggaggctcaggtttctcgccagctggccttcctcctcctcctccgtgtgagtgacgccccatggccatgatgtcatcacctcgtacaaacagaagggagactggcttggcggagctggcggctgtcccatgctgagtgcagcagtaaatttcatttcaaggctatgattaggtctgtgcccaagaatgtcccctctctcctcccctctccccaggcctgtttttctctctctgttcctgtcccgcctgcttttcctccttgccctcccctctggtccttcctctctctcctctggggatgcttcagtttctctgtgatatggaccctgtggccagcagcagcatcaggcccgagccagactctcattacctccagtttcaaactcagcctcacgtcctctggaaccggcttcctgaagcctgggacaggtctgagtccctggattcctcctggggaggatgggttggggtgaggggcagagttcctgaaggtcctcattcaaccttgagctggagtgctggacagcaggaagagcaggcttgggggtggctgtggtcactaccaccgagatcagaggcagtgaggcaggagaaaggtgagaaggagccaagcttcttggaaagcgattcagatccttctcgccattcccagctggtttctggagatttgagtctgactcgttaactcactttttggcatggccacccttcctctcagcccccagagggcccctaggctctgtggacacctgtgacagccctgtcacccatcacactctgccttgcctcttgcgtgactggctaccctggttctgtcctggtgctctccggcccaggaacaaggctgacggctcgtcacccctcagcgtcccctgcattcaccggcccctgcttgcctcccctcgaaggtgccacccagccagagccgtgttgctgtggatgcccatgaggaaggctccgatgtctgggcaggtggtgtcccaccgcacctgcactgggctgggctccctgctggggtagagggtgctctgggtcgctgtcggtgctgcctgtcctgtgggactgtggttctgaccccttgaaggaggtagcagaacgccctagatgtggcctcgttgatgagagagcccacagtcactcccagccccatcagacactgcctgccccgcattcagccatccttcctcattaagaccggcctggcctccaacccctgctcaccaggcaacagccagctgagagtgaggcgatgcgctgcagccccggggaggggcccagctggggcggggcggagatgcagtcgtcctagcaaccggcagaggtggaccccgcatttctgtggctcatcaccctgacttcatccagactccctgtattttatctcatagatttctcattctgatgtctgtctcccctactgactgtaacctcttaaggctatagttcatgtattcattcaactggtatttactgggcaccagccatgggctgtgcagacgtcagggaaatggatggggagtgacccctccttcctgcagcgcaaaccatcctttaatatgaaagagacagagaccattgcaaagagtgtgctgggtgcggtgactgtggtgcgacccaggacaatggacgggcgccagcagggttggggtggtctgggggggctgtctgggatgtctcgagtgggacctggaggttgagtcagggtgatccaggtggaggaggcaggcactgcttcagaccagggagctagcggcgctgggaggcccacaggccggaggacacccaggactccagggggtcaggctggctgagccagagccgggtgggggcagagcctgggctgtcggcacagggggctgaaggtgagtgcagggagatggagacagcggcagctgttggtggtgactcactgctactccgatgattggaaacacatgttcccgccgagaggcgcgtttattactcacagccgagggttcttggacgacatggacgtcaacagggagaggggtggggagggagagtggtcggcggtggggtggtggggaggggctccagggtcccttacttgtcgctgctcaccgactctgccccttagagtctgcgacaggatgctctggccatattcctacttgctacttaaaaaaaaaaaaaaaaacaaaaaacttatggccaggcgccatggctcacgcctgtaatcccagcactttgggaggctgaggtgggcagattgcctgaggccaggagttcgaggccagcctgaccaacatggtgaaaccccatctctactaagaatacaaaaaattagctgggcctggtggtggaggcctgtaatcccagctactcgggaggctgaggctgaagaatcactcgaacccgggaggcagaggttgcagtgagctaagatcgcaccactgcactccagcctgagcgacagggtgagactctgtctcaaaaacaaacaaacaaaagtattatgaaaaatttcagaattgcaaggacagaggccagtaccaggctgaccatggaccaacacccacgttggaaactgatcgactcatccgggtttgtttcatcaacatccacccaagaggattatttcgaagccgatcccagacattgtagttcacaggcaaatattggaagaactttttttgttgtttttacaattttatttcttatttctttttaaatgattaccttctcttcttctggatagagaagcatgtcaactttatatggcagcggcttatcttagcacaagacatttctcttaagggcaaaaccagcttcccagcatccttgccttggaatcctcaccctctgtgaaaacacacaacttttcacccatccttgcaaatatgccctggggatgccttcaggcctgaacattttaatttggcaggtggccaagcaatatgctttatttctccttcctaattcttgaggatgctgagaggctctgcccgaggcatcggctataggtaaaggcttgtcattttttttgagatggagttctgctcttgttgcccaggctggagtgcaatggcacaacctcggctcactgcaacctccgcctcccaggttcaagcaattctccggcctcagcctcccgagtacctgggattacaggcacgcgctaccacgcccagctaatttttgtattttaagtagagaccatgttggccaggttggtcttgaactcctgacctcaagtgatccactcaccttggccttccaaagtgctgggattacaggcgttgagccaccgcgccaggccaaggcttgtgatttctcaggagactggaggtttctacgtgggtgaagggacatttgaaatatgattattacttaccatgttgggatgcctatgacatgccacttccaagccatgatctgatctgattctcctcccaccgtgcagtgcggaaggagagtttaatacagcagctcaactgggcttgagaatcagataagccggagttcgcctcctaccgccagctgggtgacctgagcatgcgtgcttcatgggctccacctctccttcattatttggaaaatgggatcgtgctagtacctgtctgaaggagctcacggaacagcgtggagcacatggcaagttgttgtgatgttggctatgaaggagccaagaaacaaaagcaggatcgtacagctgggaggttgctggagccaggattcaaacccccccgccaaaagctgtcagaccctgaacgctgtcccccttttccaccagcaggcacccctgagctccctttgttagtgtccactgaccgacccggaccagtgacttttggtcctgatctgaaaggtctctctgctgggacccatcccatgggcaccagggttaggggagatgtccagggaagcattttccttaagagatcaagagccttgggaaccagtagcaaggggggcctttcagccaatgtggaagtggagaggaaccagaagagagccattcctttcccccggaggcaggtggaggccgctcctcccacctgcggacaggtcgccttagtgtgacccagtccagatctttggcagttttgttttgtttttgagacagggtctcactctgtcacccagactggagtgcagtggtgcgatcttggctcactgcagcctcaacctccagggctcaagagatcctcccgtctcagcctcccaagtagctgggaccacaggtgtgcaccgccacacccagctaatttttgtacattttgtagagagagggggtcccccatgttacccaggatggtcttgaactcctaaccttaagtgatccgcccacctcggcttcccaaagtgctgggattacaggcacagagccaccacacccagttgatatctttagattgtaaggaatagacccccagatgagacagctcagtcgaaggggcttcattcaaatgatacaaggaatgccctgtgacctacgggcagaaaacacagctggcgggcaggggactgcagtgtcctgggggccaccctccccttcttgctcctcgtgctcccggcacctcacctccactgctgccctctctgcctctactctccccactggctcactctctctctctttttttttttttttttttttttttttgagacagactctcgctctgtcgcccaggctggagtgcagtggcgtgatctgcactcactgcaatgtctgcctcccgggttcaagtgattctcgtgcttcagcctcccgagtagctgggattacaggtgtgcttcatcatgaccggctaatttttgtatttttagtagagatggggtttcactgtgttggccaggctggtcttgaactcctgacctcaggcaatccgcctgccttagcctcccatgatactgggattacaggcatgagccatggcacctggcccccaccggctctctgcatctccatggcccagtgtgacggctgtcacccactctgcaccattttagttcagatgctcccgtctcattcattcttctcccagcgtccccctcttggtagtaaggacctgactgagccagcaggggccagttgtggccactgacaccaaccgggtggtcagggcctgggagtctgaaggacagggctggtctagatgggagagggatggacagctcttggagggagggcagtgcccccacaaaaagactcatggcagagcaggtacagttgggcccttgactggcctcctgtgaggcccttctaccctcagaacctttcagcaacagaaggcagtcaggggctgggcctctggagggtctgccacaccgctcgctgtgacagccaggtgcccatcagcttgggagaggttgtgttggccagaaggctcctgtggggccccatccctcaggcagcaatctctctggccttgatgggggagggggaagaaccctatttaaggcagatgagttcagaatactggccttgtccactgtgtctcctgggcagctgtggagggcagcggccactccaggcttggccatcgcccgggagagatgtctggggctgccaccctcatattggctgccaaagaaaatatttttttgcaggtttcctgtgagctgagaatgaaactcaacacccagcaggatgagttgtgcagggtggggagggaggcttggctcagcgtgctccagccacaccagggcctgaaagtcttggcggctgagaaggggctgggtgggcagagcagccgagagtggggctggcctgggaccccagcagaaatggggttgttggggccaggcatggtggctcacgcctgtaatcccggcactttgggaggctgaggcggtcggatcacctgaggtcagggggttgagaccagcatggccaacatgacgaaacccgttctctactaaaaatataagaattagccaggcgtggtgatgtgtgcttgtagtcccagctactctggaggcggaggcaggagaattgcttgaacccgggaggcggaggtttcagcgtgctgagattgcaccactgcactccagcctaggcgacagggcaagactccgtctcaaaaaataataataataataaaatgagaaaaaaaatggggttgttgggaaactgcacgcactaaaaaggcaaaggaggggacaggctgagactaaacactcaccaagaggcatgtgctagaaatgacttctcaagggggattgcagaagctccagctaaaaataaacaggataataacaaccacttctgaaaaatacagaatgcacaatgagtttagaaagttcagataagccaaaagaaaaaatacagccgatactcatacagagagcattcctcttagtattctggcccacattatccattctttttctttgcatatgattctatatattttttcatatagatgaacacatatatagctagtgagatctcatgtgctgatttgtagccttttttttttttaacccaggaagttaccatggacatcttcccacgtcattaagggttttcctgcagtacctcttggaatgtctgcacagcattccgctgtagctctctccctccccaggaggcagaatgcggttggcaatggcaattgcaggcttggtggcccttatagctcccagccccaaagagtaagcaggtgtcctcagccgttgccatggaaaatacctgaggatggctctgattggccaggcttggatcctgtgctcatccttgagtcaatccctgtggccagcaggattgaggacttggattggccaggcctgagccacgtgcccatcctgtagccaggaggaggcaggtggaagggatgctgaggcgacaacaagcagagatcccccaggctgcaagctggcaggaactccataaatatgagtgggaaaatgctccatggtgtcttgggcctaaggctaaagatccagccccttctcctgaagaagcttataattttggggagaccccaaaatatggaaaactcagtttaaaaagggttcaatgtcaaacatgagatcaatgctacaggaggactttgctgcaggacagacttgggtttaagtcccatttctaccatgaccttggccagtctctttccttttctggagccgagcttccttccacgtaaagtgggaataatatcacctgccacactcatcagtggttgagaatttgatctgctgccataagcaatttggagcctggcacgtagtacatgtttaataggtagtaatttgtaatagcaggccaggcatggtggtggctcacacctgtaatcccagcaatttgggaggccgaggtgggtggatcacttgaggtcaggagtttgagaccagcctggccaacgtgataaaaccccgtctctactaaaaatacaaaaattagccgggcgtggtggtgggcacctgtaatcccagctacttgggaggctgagacaggagaattgcttgaacctggaaggtggaggttgcagtcagctgagactgagccactgcactccagcctgggtgacagagtaagactccatctcaaaaaaaaaaaaaaaaaaagagtagtagcagtagtgttcagggaagggagacagcatgatgcatagacccagtgagtgcttggaaaaggctggaaagtgaatggtggactcatcacagccataaggtggaaacaacccaagtgtccatcgactgaaaactaaacacaagggggtccctccatgcaatggccatgagaaggaacaaagtgctgatccatatgcaaccacatagctgaacctagaaaacattatgctaagtaaaagtagccagacataaaaggccacatattgtgtgattccatttatatgcaagtccatagagacagaaagtagactagtgttgactctgagctggggcagtggtgcaggtacggatggggaaatagaggcttgatactcgcagggtccagggtttctctttgaagtgatgaaaatgttctgaaattgactgtgctgatggacccacatctctgaggatagtaaaatccaggggctgggtgcagtggctcacacctgtaatcctagcactttggcaggccaaggcaggcagatcacctgaggtcaggggttcgagaccagcctggtcaacatggtgaaaccccatctctactaaaaatacaaaaattagccgggtgtggtgacgtgtgcctgtaatcccaactactcgggaggctgaggcaggagaaccacttgaaactcagcagaggttgcagtgagttgagcttgcgccactgcactccagcctgggtgacagagtgagactctgtctcaaaaaaaaaaaaaaagaaaaagaaaaagaaaaccatggaactgtctgtttcaaatgggtgaattgtacagtaagtgaattctatcttcacataactattattttttttttttatttgaggcagagttttcctcttgttgcccaagcttgggtgcaatggtgccatctcagctcactgcaacgtccgcctcctgggttcaagtgattctcctgccttagcctcccaagtagctgggattacaggtgcgcaccaccacgcctgactaatttcttgtatttttaatagagacggggtttcatcatgttggccaggctggtcttgagctcctgacctcaggtgatctgcctgcctcggcctcccaaagtgctgggattacaggcgtgagtcaccacgcccggcataactatgtttttaaaggaaggatgaaagaaatgtgaatctgagacttgaaagctgggttgagtttagaaagtcagagaaaagaaaccttctaggtggcagggagggcttgcctgaggctgaggggagccaagcgtggttcgagggcatgacgctggcaagaagaggctgatggtgcagggcatgtcctggaaagtgggcggggagggtaaggcaggcccggaggatgccagagcccctcagaagaggagccgggggctgggcctcgtacttctacctctgtccagctcagagtgccaggacagacagggaccgctccatggccttgtcaggacgctgtgaacaggagaaactgtaaaaagcctcagctcactggctcccaggaagatgaactctagaggccccgtgcccatggaggatgagagtgtctccatgccacctgctcacacgccaccctctgcagctggcctctcctttccttgacagccctgcacgctttctgccaacaatctctcattcacctgctctctgagccaggacccacacgaaccacacgcatccactgtgatctagatagtaagaaacaaggcagaacagagcagtggcaacggtggcaccaccagctcccccatcgccatcctctcctcttggacagacactccccagcatgggagtattttctgccacttggtgcccaccccagccctcagagctgtgaggtctgctggtctggtgctgggcatctgagtgggagttgtgggtgagggagggaccagaggaggtgagaagagcttctcacacatgagctggagaaggcagagctttgctggcaaaagagcgaacaaaaacgaagccacctgaagaccagagggtggggagaaatgacaggagtcaaacacattagttgggatggggtgatgtttcggggaccctggcagcaggagtggggggactcttgaggcagctgctatgggcttaatgcaaggaaaatccaggaaggaggaaataggggcgttttgctgcgtattttgaaaacaatgccttcattagacgcctgtaatcctagcactttgggaggctgaggtttgggagactgagggaggattgcttcggcccaggagttcaagcccagcctgggcaacataacaagacctctatctctacaatcacttttaaaaattagctaggtgtgggtgctcgcctgtattcccagctacttgggaggctgaggtgggaggtcaaggctgcagtgagctaagatcgtgtcactgcactccagcctgggcaacagagccagaccccatctcaaaaaaaaaaaaaaaaaaagcaggtggcccggaagacacgaagccaggtctgcattgtcctcccagtgctgctgaaatctgacgtttccctgagacctggttctgcttgggagacacagccaggctgggagctgcccagggccgccccacacagcaagggctggggccggctggttcgcaagccccatggcccaggtctccctcagcttctccatcctcacggacatcatgagatactgtgatcactttgctctctgtgatcgtggagtgtttgatggggaggcgtggggcctgaggaaggggcagtcctgacatcatgggggactctgccgcactaaggcacccactgaaggttggcgtgatggtggcaagtcccacgcaaggtgcaacaacctctaaagggcaggtgaacttcagggagcattccagggccagcccaagtcccagaagagggcatacaacaaagccattctcatctgtgtgggcagacactgggcctcccagcactgctctggagggctgcccaccaggctgggcaccccacgccccttgccttcctgcgtgtggaacttcacgagagacaaacggctcacgctcaaatcaaagtggtggccttgcgactttggagctcagacctaaaccctctgctgatttccttttgcgggggcatcttgacaggtgtgataattttatggcccctccctctcgacaggtggccccacaggctttgcatccatccttgtcctggcttcagctgcctgagggaagactgacaatctctcacccacccctcagggtgagcatcaggcacccgctggcctccacagatatccagagccatgtttttcttcaagcgcacaaatgttgaggttagagcttggtgcatctctgcaccgtggtcatgccccagtgacgactgtgcagaatgagaaatggaacgtcaccggcccccccgacaccacctccctcgagtccctcccagtcaccacccctgctttaaagcagctgctttcctgactttgagcactgggcattcgctctgccaggcttctgttaggccagatcaccccaaacacacatcccaatttgccaaaaccccgtctggtcattttttggaaaaaacaattctatttatctagaaaacacagtctctgcttagtttggttaaactttcttttcttttttttgagatggagtctcgctctgtcacccaggctggagtgcagcggtgcgatcttggctcactgcaacttccacctcccgggttcaagcgattcttgtgcctcagcctcccaagtagctggaattacaggcatgcgccaccatgcctggctaacttttgtttttttttttgagacggagtttcgcttttattgcccaggctctggaatgcaatagcgtgatctcagctcaccgcaacctccacctcctgggttcaagtgattcacctgcctcagcctcccaagtagctaggtttacaggcatgtgccaccacgcctggctaattttgtattttttttttttttttttttttttagcagagacagggtttcttcatgtttgtcaggctggtcttgaactctcgacctcaggtgatccacctgcctcggcctcccaaagtgctgagattacaggcgtgagccaccatgcccagccaattatttgtatttttagtagagtttcaccatgttggccaggctggtctcaaactcctgacctcaagcaatccatctgcctcagtctcccaaaatgctgaggttacaggtatgaaccaccctgcctggccaaacttaatttcttgccaacagtttgtctgtatttatctgtatcagggtgactgtcttagggaaaaagttactaggtgtctaagtcatcaatatcttgagcaatttctagatttgatccaataatctcattcccatctcctgaagaaccaaccccaaatataactaaaggacagacaagatgggaaggttttccctgcatccgcagttgggataacaggaagacgtctgatgacgtggattctagcagcaggcagcgggcaagggaatggcagtcatctctccaacggccgtgtcatcacactgagtctcagatgaacacacttaactctgggcttcctgttgggtgagattttaaaaacatctgtgttggccaggcacggtggctcacacctgtcatcccagcactttgggaagcctaggcaggtgggtcacctgagctcaggagttccagaccagactggccaacatggtgaaacccatctctactaaagtacaaaatattagctgggcatggtggtgcatgcccttatgagaattgcttgaacccgggaggcagaggttgcagtgagccaagattgcaccactgcactccagcctggcagcctgggcgacagagtaagactctggctcaaaaacaaaaacaaaaaaaaaggagggaagcagtggagggagctcccagcccagggtctgccttcctccttcctcttctgccctgggcgtggggcatgcggaccctgtcacctcccctatgggtggcagcccttcctcatgttcaagtttgtcttgcatggttgagccctcctcgccacagagcacagagaagtagaaggagaaggagcggcttgcagcctgggcaacatggcaaaaccccatctctactaagaacacaaaaattagttgggcgtggtggcaggcgcctgtaatctcagcttctcgggaggctgaggcaggagaattgcttgaacctgggaggcagatgttgcagtgagctgagatcgcgccactgcactccagcctgggtgacagagcaagactccatctcaaaaaaaaaaaaaatctgtcttacttaagtccattgagttggagttttatttgcaaaccagacagagagacagtgtcagatcacgaggcatttccacccactgaagaaattttgttttctgcaaaaaggctgtgatgaccttttccttagtttgcccatttctcgtggacaggtaaagatggcctgccacccttctgggaccggctttggactcggctccagccagctggttctgaaggaagtgctcaggggacaggccctgagcactcatacactgaggagggtagggcctgcggccgagggcagagtggggaggaggggaggcaggaggctgcgctgctgggcacagctttcccagaggccgcaccttttctagagatgctctcaggacactgttattcttggaggctttcttgaccatgctcagcaaagctttatgtgccaaagctgcgggacggggctgggtatgtaggaggaaatcaggcttgtcaaagttaaccttgagcaaagaaaacaagaatggctgtgtcttgggctgcagtgttttactgtaacaaggctgggttcatggccgtgaatgtgctgataacataaaagcactgaggcgccgctccttcctgccctgcccccatgtcccacacaggtcctagagagtctttctattgcccatttctgccgatggcctgggaaagcagtggctccctggtgccaaccaaattgcctcctctgggctgtgggaggcctgaagaggctctaagcaccaggctggcggggcagggtggccccggcccctcttcccacctttcacaagtccacatcttagaggactcagtcacaacgtgggggtggcatctgggttttgaaaacaagtgactgggcatagtgactcatgcctgtaatcccaacactttgggaggtggaggcgggcagatcacctgaggctaggagttcaagaccagcctgggaaacataacgaaaccccatctctacagaaaatacaaacattatctggatacaaacattatctggatgtggtggtgtgcacctgtagtcacagctactcaggaggccgaggtgggaggatcacctgagcctgggaggttgaggctgcagtgagctgtgattgtgcctccatactccagcctgggtgacagagtagactctgtctcaaaaaaaaaaaaaaaaagagagagaaaaaagaaaacaagtgaatggctgggcatggtagcacatgcctgtaatcctagcactttgagaggctgaggccagaggatcgctcgaggccaggagtttgagaccagcttgggcaatacagcaagaccctatctctacaaaaaaaataaaataactagccaggcatggtggtacttgtagtcccagctactcgggaagttggggtgggaggatcacaaggctgcactgagctatgatcatgccaccacactccagccggggcaacagagcaggaccctgtctcttaaaaaaaaaacaaaaaaaacaaaaacaaaaaatggctgggcgcagtggctcacgcctgtaatcccagcacttttgggggctgaggcgggcggatcacaaggtcaggagatcgagatcatcctggctaacatggtgaaaccccatctctactaaaaatacaaaaaattagccaggcgtggtggcgggcgcctgtagtcccagctactcgggagcctgaggcagaagactggcatgaacctgggaggcggagcttgcagtaagctgagatcacgccactgcactccagcctaggtgacagagcaagactccatctcaaaaaaaaaaaaaataaataaataaaacaacttaatgaaccttgccatattcagaagcagagaaacatgttttgtaacataagcacctaaaaattctagctgaatagctatacttgtcttcatttattttctctccaagtatgatttttttaaaaaaaacttttctatagagacaggtgggaggatcacttgagcctgaaaggttgaggctgcagtgagctaagattatggcacttcactccagcctggacaacagaaattctgtctcaagacaaaagaacagtgtttttcaaacagtgggtcatgactcttaatggttataaaagaaatacttattagatggagaaaatacatctcatgccttaatcctagcactttgagaggctgaggtgggaggatcgcttcagcccaggagtttgagacctgcctgggcaatatgatgagattctttctctacaaaaattaaaaaaattagccagacatggtggcatgcgcctgtagtcccaggtactctggaggctgagttaggaggattgcttgagcctggaaagtcgaggctgcagtgagctaagatcccatcactgcactcctgccttggtgagagagaccctgtctcaaaaaccaaacaaccccccatcacacatacacaaaatcaacgtctatcacatggaatacagatggcacctgttttggttgcatatgaatacatgctgtgtccactaggtagggatgcaatggccttggttaagaccctctcaattggccgggcgcgatggctcacgcctgtaatcccagcactttgggaggctgaggcaggcagatcatgaggtgaagagatggagaccatcctggccaacatggtgaaaccccatctctactaaaaatacaaaaatacatgggcgtgatggcaggtgtctgtagtcccagctacttgggaggctgaggcatgagaatcacttgaacctgggaggcggaggttgcaatgagccgagatcacaccactgcactccagcctggcgacagggtgagactccatctaaaaaaaaaaaaaagatactctcaattataagcaactatgtaccaaactcacacagtcttagacagtgaagtagatttgcttgctcacttaactgaagagtccccagggagggagctgtggacatggaacaaagctcttccctcttctgagcatctgcttcttgctcagagtggatcacctcatggtcacaaaatggctgccagtacaacacacttccacattcaagttgtgccacagaccggaagtcttgaactttgctatgaagtggttaatagtataggctcagaatcatatagatctgacctttaacttagtctccattgttttctggcctgtgaccttgggcaagttacaaacctcagtttctataaaatgggaagaaagatcactccagtctcactgagttgtggtgagaattgggtgaacgaatattaagcacttagcacggcccccatggtgtagtgagcactgtatgaatgttggctgtagagggcccgtgattgcatcagggtcctctacaggagaggaaaggagagctgttcctctcctttctctgggggaccctgctggttttgtttggaatccacacctcccctagacactctggggagagctgaatctaccccagctccatcagtgacacatgtcctatctgctggtcttggttattggcctagtgctggataaatggcccaaagaggcttggtgagaatggagaagacatctgggagactgtggcagaaggcatttttcgagatggacatagcagcttccacgctactcacactcaatgcgaccttgacactcttcccaagagcggtgggatatgcagccctaccccttgaatccaggcaggcctttgtgactgccttgaccaccagtctatcacaagtggtgctgtgtggcttccaaggctgggttataaaatgccatgtacatctgacttgttctctaacccagccaccatgctgtgaggaagcctatgcagccctctatgagagcagccgaggcccccatttcacagcccttgttgagttcccagacaacagccagcaccatttttcagccacgtaggtgagccatcttgaaatggatcctccaattcccaggtgagctgtcccagctgatgccatgtggaagagatgagccacccttgctgagccctgtccaaattgcagattatgagcaaaatgaaagatccttcttagcctctaagttttggggtaacttgttatatacaaatagatggccaaaatggaagttctggaaaagaggctcactcctgccttttacctttttagggtcccactctatcaacctggctggagtgcagtggtgtgatcatagctcactgcaacctcagactcctgggctcacacaatcctcctgtctccacctcttgagtagttgggactacaggctcatgccactcctgccttttaaatgttgtggtatagagcctggagccactgcaaccactttgccactatgatggaaactagtatgtgaatgagttgctgctacagaaggcataagagagaggaagacctgaatctggacatggttgaactgctgggctccatcagccatgaagtccacccggttggtatactttctagttaatatgagtgaaaacactacctccaaagggtaagcatttctcaatcatatttgttacttatagcccaaaccatcctaatataccatctatccctaacagggaatcatcagctgggtttaagcagagggaaatgtctcgatgagatgctttagaacaatagctatggtgtctccacagggctgtcctggagagggctgggagacaggaagaccagccaggagcctgcagcaaaacttctaggcaggagaaggtgggggtcagggtcaagctcatggagccggaggctggcattgcggagtgacagtgcagggctgtgcatgacagaaggacacaccagacaccacctgtgctccacggagagatgaacaagccctgagcaactggggaatagcaaaggaaactccaccaaccccctccctctcctcccttcctagagaggaagcctctctctccctttgtcctcactgcctgactgtgaggatcgaccagagatctcccaggaggattttggaaaaggctctaaaggaagtagaagcttccagacccaagtggctctcccctttcagctgctgcccacccctacatttgtgctcggtcgatccccacccagctgacctcagctgagctaggaccggctcaggaccccgcccccagcaccccacacagctgggagttgttactgcaggccctcagatgtttacccaagggcctgccttgccttcgctctctgctggcaacacagattcttaaagggccgaggctggtttctcttctcctgggcctgggggaccctcttctctctggatgcttcctgggagtcccctccaggccctggtgtctgtagggaaacccccttctgtaggcgacgggggcggaatttggacagccacggccagcagtctggatgactccctcagtggccagcccctggggcccaggtccccctgactgtccagggtggcccgcctaactggcctccttttcttccatggctgggagggcattcacccccaccgtggggaagctcagggcaagttcctgagacccactttttgaggacccctcctaccaaggtcttcctggccaggcctcctctctgatcgggtgaataaacacaggaaccccagggtttggggaacccacagccccagaagtaccaaactgtgctgaaatgcagaaaaccctttttaagggagctgaaggttttaagcatttgaagaaattctctgaactcataagacaccaggcaggctatggacgtgtcccacggactccccacccccgagcccaaagggagctgctggtccagcagggcgggaggagctggcttggcccatcatgtggtcagtggtgagccctgcgagtggttccccaggctgagaccatggaggagggcagatcagccacccaggcctcggtgggctcggtgccagtggggtccagctcctctgctctcctcttcctgagccccagcgaaggcacagccttcggattgtggcaaagcctgaaccccaaacatggagcactgcccgtaatcagatgggggtgagagagagcttgtcaccaggcctgggacagcaccaaaattcctaacctagggctccaaaagaggaaagattcctgcaggagttagcttggagccggtcctccatgaacatcaggtaatgacaagaaaagatgccagccagatgtgctggctcatgcctgtaatcccagcactttgggaggccgaggcgggaggatcacctgaggtcaggagctcgagaccagcctggccaacacggtgaaaccttgtctctactaaaaatataaaacattagccgggcgtggtggtacatgcctgtaatcccagctactcaggaggcagaagcaggagaatcacttcaacccgggaggcggaggctgcagtgagtcaaggtcatgccactgcactccagcctgggcaacagagtgagactctgcctaaacaacaacaacaacaaaaaacaaaaagaaaagacgcgtaaacatccccaccatcttgatcgcaaaaacagtcactgtcaaagactccagatgcctttcattcagtatttacaacacccttgaagaggtcagcagcccatattacagagaccagagctgagcttcagagaggggaggcctcctgcctaagatcacacagccaagaggcaggcggccagcctggacttgtgactcggagcagcatctcaccaccttttgcaacggatccatctggaacccagaggtcacgttgctcgttgggctgtagttgcagagtgagaggcaggcgtggtcttgggctgcggggtaagaccagggcaagcagggcctcagctttgggttgggggctttaaaatggacacaggactcctttgagcctcctggagaaaactgtcttagggcagctgccctctaggatgagtgggtgggagggacggggtcgctgaggcctcccctgagctctagtctcgttgcaggcttggaaacggccccagtgaatgcgggagaggagaaagccagcagccccaggagacggtgaaggtcaaaagcagccctggttaccatcgctagccagcccccaagtctttgcgttgccacggcaacgctactcctgtgctacccatccccgcacggggtctgctgtgactgaagcaaaaagccgcttccacgaggctccttaaaaagggtttgaggctgtctaatggggaccagctgctcagcaaattacaaacacgcagaagaataaggctctgctggctggtagagttcccctgcccagccctccctgcatgcagcttctgctgggggcaagagagcagcccctcccggagaagccatccgcccaccctttccacctctgacagcctccctggagctgagctgtcctgacctcagacacccagctggctccccaacttccatgtccagctccccactttgtcctccattctgttgagaaggggacgggggcagggagacagcccaaatagagcgcaccccatcagaagggtacggtggggcaaaggcgtccccagcgttccaagctcccaggagattccaatacacagctccagaggtgaatcactggcccagacccagtggattttacactcatgtggcgccagaattccaggagggctctgaagtcacaggcgcaaactcaccccgattccctggtctccggttcagtcggaccggggtgttcccgaagaatccgcgttgctgacgggtttcctaggcaccgggatgctgctgagtggaaccccactttgagaagtacaggttccatctgctctgatggtgagcagagctgctcctgcatctgtcaccttcgtcatttcctccacttgtgactcaactaggattcatgttctgaattttgggggtttcctcctggggtgtagatgtagtgaaggtggacataggtctatactgaccttttgtgtgaaggcaggggttccttcattcattcagcaaagacttgagggctacccacgttcccacctggtgccgggctttcccgggaaagacgaattcagcctggcagtgacggagacaccggcagggatctgccacaccctgtggaagggccgtgagggacacagagtgtgcttcggtcacagggtggggctgagactcggatgcccgagaggcactctcagaggtcgtgaaggctaagcccctggtccccagagtgtgccagaggaccagcagcgtgggcattgccgggagccgattagaactgcagaagtgcaggcccctgtttagcaagatcccagtgactgagggtacccaaaggttgagagatccccagaaacacacataggaattaacctggtaaagaagaaaaagaatgttccgtcctggccaacgtggtgaaaccccgtctctactaaaaatacaaaaattagccaggcatggtggtgggcacctgtaatcccagctactcaagaggctgaggcaggagaatcgcttgaacctgggaggcagaggttgcagtgagctgagatcgagcgagatcgagccattgcactccagcctgggcaacagagcaagactccgtctcaaaaacaaaacaaaagaatgttccagaaaaagaagtcatgagtgcattacaagaatgatttttttttttttttttggagacaaggtcttgctctgtccccaggctggggtgcagtggtgccgtctcagctcactgcagcctcaacctccctgggctcaggcgatcctcctgcctcagcctcctgagtagctgggactacaggtgcacaacatcatgcctggctaatcttcgtattttttgtagaggtgcggtttcaccacattgcccaggtgggtcttgaactcctgggctcaagcgatctatggcctcccacagtgcctggctgaaaagaacttccgacgcccagagccaggatttctggggctgggtgatagggatggggaagcatctttctttgtgaagggaccaccaggggctgctgtcggtcccttacgtggggtagccaaccctcccagtttgcccaggatggttttctgtcggtcatgttaaagaaaacgattcagtgacacttgtgtgaggtcagtgaggctgactcgactcagggccgtctcgataggcgcagggaccatgcagggggaacctgccatgggcagaggtcagggtcaactcagatgcagcacggccaagtgaatttctagccagggagcagggtgggggtcagagcggggggaattactaagaggaagcagggggtcagggggattccggctaaacccacctaacaggattcttgctgaaggcaggccggggtgaccagacatcgcctgagggacggtggaggatgggggcttcttgctaaactgacttcgcaggaatggcagaaactggattttacaaggcggcctggagatggggcccgggagaaggtttggggacctgaggctaaagcgccaaggacttcgtcttcacttcccccacctctgactctgccctggggtggtggaatgactcacctgatggaaaaaactgggtgttgatttgctaaaatcccaaaagcaggtctgcatttagaaagcgctggctccttgagaagcctggcctggaacctggagcccaggtgggctccttgaacagatgatgcctgagggatgtcgcctggatgctgggagtgagcgaggcagcaaaacactgtctcttggcctgtccccaagtcaaaatcccaccttaggggggccagctgctttgggttaagggtgggggagttgagagatggagaggagcttagaagtcatcagggctccccgttttagagagaagagcctcggggcgggggagaagggactcagctctggaactaaggactggacctcgggtcccaagccccagtcttaggagctgctacctccttattaaagtgccagggggccctccaggacgggccccatccaacgccagccgtctcatctctgtcccactctgttagaaaacacctccttatattaagctaaaatctgtcttttccacagtttctttgatgcggcctcttggatctttttaagatgctgtgatcaatgactcactcaaatcctctctcaccaatctcaccaccagcatcctcaaattgactgaatttgctgtctatttctaaggtcaaatttgcagccacttcctgatacctcccacggaggttggcgctggtcctccatgcaaggaggtgactgcggccaagggactcaccaaacgtggaggtttgccaaagttatgtcgaagagcctggatctcaaagtgagccgtctcccgggaaacagctcgagacgttcagattctgaacatccgctccacatgcggcaggggggcttgagagctctcagcacgttcatgtgagagaagaagcccaggaggcccccatgggctctgacatccaggaggcttgcaatgggaggatgggggtgtgggaaggtccccctgggagccaggactccatcccatgcccagcatccacctgaatgccagcaggattcgaattagagaatgcacgtgatggcaaaacagcttgcactcccggaaccctgagcagcctcctgtgggctgaattccgtcccccagaaagatacatctgcgtcctgaccaccagtacctgtggctgtgactttttttggatatagggtcttcgcagatacaatcaaggctcttggccaggtgtggtggcccacgcctgtaatcctagtactttgggaggccaaggcagggggatcacctgaggtctggagttcgagaccagcctggctgacatggcgaaaccctgtctctactaaacatataaaaattggccaggtgcagtggctcacgcctataatcccagcactttgggaggctgaggcgggcggatcacctgaggtcaggagtctgagaccagcctcaacatggagaaaccccatctctactaaaaatacaaaattagccaggcctggtggtgcatgcctgtaatctcagctactcgggaggctgaggcaggagaatcgcttgaacctgggaggcggagtttgcggtgagccaagatcgcgccattgcactccagcctgggcaacaagagcaaaactccgtctcaaaaaataaataaataaataaataaatacataataaaataaaataaaaataaaaataaaaattagccaggcgtggtggcagatgcctgtaatcctagtactttgggaggctgaggcaggcagatcacttgaggtcaggagttcgagaccagcctggccaacatggcgaaagcccgtctgggagttcccaagctgggagatagggcagggacagagtctcccttagagcccccagaaggaaccagccctgtagaccccttgacctcagacttctggtctccagagctgtgaaaagaaaatttctgttgttttaagccacccaggaaatgtctgtcctttaggcagacccaggaaactaataccaagcctcgcattcctgtcccttcccaggagtcaggtctggacatcatgtagcccccaggatctgaggtgggctggaaaggccggagactgggtcctgcttcagggggattgagggggtcagagacactggcaagcttgggtgaagcagagatttgcaggctggctcccggctgccccgacttaagctagttctgataaggaagcagggccgggcagcatgactcaggcccctactcaccccacctgactctgggcagtgcagtgatggcccagagtccagcccttgggatgggctgacctggccctcctgagaccccactcccactgcttggaatgttggattctccccagaccatctatgaacaccgccctccttttgtctttgggtcaataccctggcgcacccctccagccaggctccaactcaccttccctccctcctggcagttgtatctttctctccatctctgctgtggtctgtttatctcctctcctcccattagactctaaatgaaaactgtctctacttctgacactcaacgtgtgggccttcctcccccataccgagtagttctccagtttttgtttttgttttcccctgtgacagtgtctcactcttcgcccaggctggagcgcagtggtccgatcctagctcactacagctatgcaatcctcccacctcctgccaccacaccccgctattttttaatttttgtacagatgggggtctcactatgttgcccaggctggtctcgagctcctgggctcaagatattctcctgccttggtttcccacagtgttaggattataggcgtgagttcgtttaatcctgatactatccggagttagcgcagaccccacaggttaggagctcaagactgcccgccacatcagaccccgaacataagcagagggtcctcaggttgcccacgtttcagtccaacttggctacaaattggaggcttccatgaccctcttcttgggtttggtgatttgctattgggggctcccatgaccccctcctcaggtttggtgatttgcttttcctttttttttttttttttttttttttgagacggagtctcactctgtcacccaggctggagtgcagtggcgtgatctcggctcactggaacctccgcctcctgggttcaagcaattctcctgcctcagcctcctgagtagctgggactacagtcatgttgtccagctaatttttgtgtttttgtagagacagggtttcaccatgttggccaggctggtcttgaactcctgacctcaagtgatccgcccgccttggcctcccacagtgctgggattacaggcgtgagccaccactcctggccgatgattcgctattggtggctcccacagcctcctcctcaggtttggcgatttgctatggaagggctcacagaactttccttagggcctcaggttgatgataaaggatgccagaaggagacacatagagaccaaggtccagaatccagggcaggcgcttctgtccccctggagtacgcgttatgccagcctcccggctcatgggttcgttcattaccctgaagttctctgaaccctttctcttcaagctttgatggaagttccactatgtgagcatgattgatgaaatcatcgacaattggtaattgactcaatccctggcccttccgccttcctggaagtcggggtggggctgaaaatttcaacccactaatcccatggttggttcctggggcagcagcctccattttgagactagctagggaccaccgagtcacctcattagcataagtaggatggtggaaaggggttccttataagtaacaaaaggtgcttctctcacctctctcagaaaatttcaagggttttaggagctctgtgctgggaacccaggaaccgggaacaaagaccaaatagaatatatatttcttgccaggcacagtggctcatgcctgtaatcccagcactttgggaggctgaggtggatggatcacctgagatcaggagttcgagaccagcctggccaacatggtgaaaccccatctgtactaaaaatacaaaaattagctgggtgtggtggtgagtgctactcgggaggctgaggcaggggaatcacttgaacctgggaggcggaggttccagtgacccaaaattgtgccactgcactccagcctgggtgacacagtaagactctgtctcaaaaaaaaaaaaaaaaaaaaaaaaaaaacccacaaaaaaatatattttttgaataagaatattttgaataagaatatatatttcttattctctcacagccctgactgagccccttgcaaacagagcccccagtcctctccctggtgcccctgagcttggcctggaggagtctctgtgagaatctcctgaattgggcttttgaatgcacatgggtgaatgcacacatatggtgtgtgcatatgtgcagacagaacacacatgtaacacttggagcgctagcgtaagcaggagggaggtgtggaagacaggcctgcattcttcctctgcattttgcaactgccacaggcttggcttcgagctcctggcttcaccccagtgacattctttcagaagcccagctgctgccacatcaaaccatttctgtccagctctcactcaggcccagccacctccatgggccacacgagtggggcacgaggaagcccagccttttcagggagttcatgagtgtatttgtgcaagggtgtggctagaacctggggtgtgaatgcctcaacagccaggaggctgctgttaagaaatagttcactgcagccaggcgcagtggctcatgcctgtaatcccagcactttgggaggccgaggcgggtggaccacctgaggttgggagttcgagaccagcctgatcaacatggagaaaccccatctctactaaaaatgcaaaaattagccaggcatggtggtgcatgcctataatcccagctacttgggaggctgaggcaggagaatcgctggaacccgggagacagacgttgcagtgagccgagatcatgatgccattgcactccagcctgggcaacaagagtgaaactcagccttaaaaaaaaaaaaaagagtcatccatgaatcccctccccaacaaaggtgctaacacaggtcacatgctcttctccctcctagccaaatccatcccaaaccaattcccacagcaaagaggatggaatttcccatagtccctccctcagatcgccccaggctgctgcccagtgggatggttccctgaaggaacatataggtcatctggggaatgaggaagagtggggaatggagactcaacagacaaccagtgaatgttctatacaggattgttctgcacgttgctcttttgaaaaacttgggccaggcacagtggctcacacctgtaatccagcactttgggaggctgaagcgggcgtatggcttgaggtcaggagtttgagaccagactactagccaacatggtgaaaccattctctactaaaaatacaaaaattagccgggcgtggtggcgggtgcctgtaatctcagctacttgagaggctgaggtgggagaattgcttcaacccgggaggcggaggttgcagtgagtcaagatcgcaccactgcactctggcctgggcgacagagcgagactccatcttaaaacaaaaaacaacaacgacaaaaaaacacttgatgttgtatcatgaagatcctttatgtcagtacatatgggggccacaaaatccttctgagtagctctacaatagtccactctccggatgcccggaatgaactgagctgtccctcaatgcgtggaatctccttctgcctttgtgaagcctgcctccatgtgacctgcaaggcccaggtcgctgctctcaagtggcctcgcggggctttgagcctggaacagggctctcagtaaggcaggagtggttcaaatgcttgctgtgggtggtgacatcagccacagcctgaacccagtgtcccctgagggcggtgagcaagtctgtgtcaattccagccagattactccgggttcagaggtcctcagcttcctggttatggccaattacaaatggtcataaattcttcaaagcgaccctcatcaggaggtggagtttattttccacctttggatcgacgctgaccttgtgatgtgtgtgtctaagcctggacctcaagaagcctcgcatgttaggctgggcgtggcgggtcacgcttgtaatcccagcacttcgggaggccaaggcgggcatattgcttgagctcaggagtttaagaccagcccgggcaacatagcaagaccgggtctccacagaaaatttaaaaattagccaggtgtggtggcgtgtgcctgtagtcccagctactcaggaggctaggggacggagtggggaggattgcttgagcccaggaggtcaaggctgcagtgagtcatgttcgggccacagccatgatcatgccacttgcacttcagcctgggcaacagagcgaggctctaaaaaaaaaaaaaaaaaaaaaaggtttttttttttgagacagagtctcgctctgttgcctaggctggagtgcagtggcacaatctcagctcactgcaacctccgcctcagctcactgcaacctccgcctcagctcactgcaacctccgcctcagctcactgcaacctccgcctcccaggttcaagtgattctcctgcctcagcctccccagtagctgggattactggcacgtgccatcacgtgaggctaatttttgacagggtttcaccatgttggccaggctggtctcaaactcctggcctcaagtgatctgcgcaccttggcctcccaaaatgctgggattacaggcgtgagccccactcccaaccagaaacaaaacaaaacaaaaaaaggttctgcattccacatcatggaacactgctaccatgggaccaggcctggcttagcgtccaccagaatgagaccctatggagagaggggccccaccttcccagctcttccagccaccccaggtgaggcctctgacataagtgagcccagccaacaccatggggagcaaaggtgagccctcccaggtgagcccagctgaaatgacaacccacagggtcaaggcggatgaatggttattgttctcatggtttttagccaccgagttttggagcagtttgttactaagcaaaagttaaccgcacagccaccttacttaattcccgctcaactcctagccttcctatcaattctgtgaccttcataattttttccataaatcttttttctgttgaagttaaccagaggtggtttctgttggttgaaactaagaacactggctggtataaaaattagtatgaggctggccgggcgcagtggctcacacctgtaatcccagcactttaggaggccgaggtgggtggatcacgaggtcaggaatcgagagcatcctggttaatatggtgaaaccccgtctctactaaaaataataataaaaaaaattagctgggcgtggttgcgagtgcctgtagtcccagctactcgggaggctgaggcagaatggcgtgaacctgggagcttgcagtgagccgagatcgtgccactgcactccaggctgggcgacagagcaagactccatctcaaaaaaaaaaaaaaaaaaaaaaaaattagtacaaggccaggcacagtggctcacacctgtaatcccagcactgtgggaggctgaggcaggtggatcacctgaggtcaggagtttgagaccagcctggtctcacggtaaaaccccgtctactaaaaatacaaaaattagctgggcgtgctggtgcacacctgtaatcccagctacttgggaggctgaggcaggagaatctcttggacccaggaggcagaggttgctgtgaggcaagatcgtgccaccgcactccagcctgggcaacaagagcaaaattctgtctcaaaaaataaaagttcataggagctttactcaaaataacaacaagaacaacaacaaaaaccaccctctgaaaacaacccaaatgcccatcccctgtagactgggttgataacctgtggtatagtcacgtaacggggttcacttcagctacaaagaacaacgtgcgtgaatctcataggcattgtatggaagccaaaaagcctgacacgacactagggagtgggtactcaggtacgattccatttacatgaagttcaagagcaggaacaactactctgtgtcgacagaaatcagatttagtggttccatggtggaggttctgacctagagagccttctggggtgagggaaaggttcggtatctctatccgaggggtggtgccagcagtgtttacatgtaacacaacaattaaccaagctctacgcttcccacatgtgtgtgtgtaatataccaataaaatggtttttaaaaatctcactggcaggcagggtgctgtggctcacgcctgtaatcccagcactttgggaggcccatacgggaggattgcttgagctgaggcatttgagatcagcctgggcaaagtagcaagaccccatctctagaaaaactcaaaaattagctgggcatggtggcacatacctgtggtcccagctactcaggaggctgaggtgggaggatcgcttgagcccaggaggtcaaggcggcagtgaactatgatcacgccattgcactccagcctgggtgacagagtgagacactgtctcaaaaaaataaaaataaagaggagctcagtctcgggatagacaactgagaaaagttttgtccttttctgctaccttcttcttgctgcctgaaaggcagaagtgatggctggaatctcagcagccattgtagatcatgagggtagccttgagggtggcaggcatacaataatggtgtacaaatggaagaagtctacctccagaaagggtgccttctcccttttatgtgtcagaaaataacaaaaaatgtcatatagagtccctgctatgttgggctttcatgataggaagctgaagctaaaaatatctagtacaggtgcatgcatgagagattctggctttgtgcgctagcttgagcagctgggagcagtgctaattatcttctcaattgcttgactgaaaactggagtcacggatggcccgtgaattcctcagtgtgttgtagagaaaagaatccaaggcatcgaggagccaggtgccctggagtgtgtgccgtgtgcagtcaattgctggccttgactctggacagacccaggaagctctcctcccccaaaagcccgcccagggaaatgtgcagggaaggaggaaccagtctcctagaaaattccctgcggctgctctgtgtaggtcagagaggccctctggagatgctgcaattgaaatgcttcgtgatggccataaggtggaggtgcacaggaccaaaacaggcagggagcttgcaaaaccctcacatgatctgtagtgttagaaaagctcaagatccgggatgggcgcggtggctcatgcctgtaatcccaaacactctgggaggctgaggcaggtggatcacctgaggtcaggagttcaaaaccagcctggtcaacatggtgaaacaccgtctctactaaaaatacaaaaaattagccgggcgtggtggtgcgtgctggtagtcccagctactcgggaagctgaggcaggagagtcgcttgaatccaggaggtggagcttgcagtgagctgagattgtgccactgcactccagcctgggggacagagtgagactccacctcaaaaaaaagaaagaaagaaagaaagaaaagctccagatctggtgaacagaggcaccttgtgccatcacgacagagtcgtagcctctcacccatttcctggatcacccagagccccttggaaggaagggtggtcaaatctcttacagaaaggaccctgtaataaaatgacaaggacttacagtaccaagaatccgcttcctggccttccccaaagaggctcttggccgtgaacccggcgaccgagctccagggcaggggttcggcagctgtcccgaggacttggtgagtagcttctcgtgagttacaccagatgaagacggcgctgccactgtttcagatgtggctgattggagtaaatgagcacaccccgcacgtggatgcagcagtggctgacggcagctccctccccctctccctatctcggtctgtctctcctgcgtccacacacacacatgcgtgcacacacatgcacacacacgtgtcctgcctcaggagtacaccggctgtctcgttctgcttcctgccaactcatgatgctacagtcatcacactggaccaaagtgaaccccagtgggtgccctatgtgtgtaccccttggtgccttagaaacgggcccaaccttggctagatctctgtggacttttgaggggacacatgccttacttggggagtggctcctgcctctttactagagacccaagtctggtgtcagagcacgaggccactgtctgctggtgcagctgccttgcctgtgaccttaagatccgttaggccaggacgtggggcttgagatgcaggaagctatgctgatgggcgtgaggggcccgcggcaggcccgctgggaggaccacccaggagcatccagcggtttggagctgagcagggccctctttggcagggagattcactccttccagcacaaccagctttggcccaaacattcgagcatgggtcatgagctgccctccatgagctggaaggacacaggtggacgtggccctcaggagcgcgggcagtctctggagacatgggtgattttcatctgtgccaaggctgccccaccctccacccagggcacctggggcttcccccagggccttatggtgcattccctaataccggtgacggaggtgacggaggtgacggaggtgggagaaacgcaagcctgtttcagattgcactgcgggctaattccaggtgggagtggcctgttgcccagcagaaaggggacctcgctttgggcagaacccggagtggccaatctcagtttccgtgtggatggagggaagccggccttggccacgtgacctgtggaagcagctcagggtttgatcagagatgccagggctggagggaggaggatggaagaatgagtagccgtgagctttgggaagagagcagggaccggcgtcttgggatggccacagagatgaggatgcttctgtcccctgactgttccctgaaaggccccactgcagtcctatgctggggtgcctaccccggggtgtggggacaggtgtcacagagtgtcactctgcacctctacagcctccagggcctcctctgctgagaggtggcctgtggggagggaggctttgcacgggctcaccactgccatgtcaccaaggctgatgggagcggacctggcgctcctgggccttcgctcggcgcctcgatgcccatggggagctccggcttcctgaaggccgtggcttgcagccgaccccttccatcggaggaggcagccgcttgctccccaggaatcgacacttactctagatctgaatgcccccatcctacacggccctcagtgccaccagcccttcactgactcaacacctttcccaccctgttggccacccacagacatgcaggtgactcaggagctgcagtcaggccgtgggctcatggtcacatgtgtcacctatcacacattcaagggctcacgaaacaggaaggctgggatgaaacctcaggctcaggaggccagtgaagggaaaaatgcaagagcctggctctgcggacgtgctgggcggcagatgagacagccccggaagtccctgcctccaggtcccccaaatcatcctttcctccctccctgtagacaagaaaatgctgccctccacctgtggacgcaccagctcaaggagcccatctgcatttctccttgttcagaatgcacagcagtgagccatggggccctgagcagggcgcccatcacctagtgcaaaggttctgcttctagtcctgaaacctgggttctgtttttttgtttgttttttgttttgttttgttttttttgagacagagtcttgctctgtcaccaggctggagtgcagtggcatgatttcggttcactgcaacctctacctcccgggttcaagcaattctcctgcctcagcctcttgagtagctgggattacaggtgcgtgtcatcacgccagctaatttttgtatcggggtgggggggttttcaccatgttggccaggatggtctcgatctcttgacctcgtgatccgtcctccttggcctcccaaagtgctgggattacaggtgtgagccaccacaccaagccgacacaggggttttgcacccaagagaggaacgtttccacgatgagacatctccacgttccttcaaattggcagtgaagatggggattcgcctctgggaccacggtgcctgtgggtgaacaggtgaagaagggaggagtgtttcggaggctgggatggtcggtcctgactgtcccgggggaacagggctgccgctcaaaactgcaagcagcacggaagaactccagtgacttctcaaactcctgcatctcccagccccacacagggctatggcctcccttgcaggcaggacccacggggctcagagttccctggaaggaagactccagttaccttccctggccgtgagatgccagggagcacggagcgggagagaagagagctgctgtggtcctgggactgactcgagaaatggaggctgtgattctggtctttgccatgtctgccacgcctctaccgtgacatcgcttttccttcttcctcctgatctcattgtggtttgtccccaacactggtcttggcagtggtccgtggcgacgtggcccctcggttgctaaaatgtcaataggatcaaaatagaggtggaggagataggccgggcagagtggctcatccctgcaatcccagaactctgggaggctaaggcgagcaaattgcttgagcccaggagttcgagaccagcctgggcaacatggcaaaaccccgactctactaaaaatacaaaaaaagaaaaaaaaattagccaggcctgctggcgcacatctatagtcccaagtactttgtagtcccagaggctgaggcgggagaatcacttgggcccaggaagcagagtgtgcagtgagccaagatcgtgccactgcactccagcctgggcgacagagtaagacactgtctcaaaacaaacaaaaaacatgtggaggaggggatgtcctgccaggatggtggacctgggctggacgcaggatctggaggtgggggggttgggggagcagaggcctccatccagtacagggagcagctgccttcacaggcaggaggttttgtgagactgcttttgttccttgtggcacctgtggggagagggtgggtggggcgtctgctgccatcttggctgttcagcacctgaacctccctcccattaggggagcccctgtgccacctcctgttccagaggccacactgttgtcctcccagaccgtggcacagcggcaggtgccagcctgagctcggcccagcaggtgcctccctggggactctgtgcctgcaacgggccatggagaagcaggggcagttttgaattcctgttggtggtgagcgacgttctgtgcccagaacctgctgtggcattgtcacggatgtccccccggcatccaatgggtcccccagcctcccctgagactctgtggttcccaggatcttccagcgcacctctacccgcctcactcagcccaggggaggtgccttttatttgtagtcaagcacctgttggtgggtattgacgtcgtttccaattcttcactcttacaaggctgagatgagaatctctgtcccctgtccctgtggaccaggatttccagagcgaaggttcctaactcctgctgttcgttctccctcctcccagcttccacagtctgctgtctgctgctctccatgacccagcccggtcacgtcttccagagacccgatcgccccgccggaggtgcagccctgaccttgccacctcagcaccctctccttccggtcggacgtgagcaggaggtagtgctggcaaaagcacacccacccataggccaggcacggtggctcacgcctgtaatcccagcactttgggaggctgaggtgggtggatcccctgaggtcaagagttcaagaccagcctggcccacatggtgaaaccctgtctctacaaaaatacaaaagttagccaggtacgatggcaggtgcctgtagtcccagctactcaggaggctgaggcgggagaagcacttgaaaccgggaggtggaggttgcagtgagccaagatcacaccactgagctccagcctgggcgacagaacaagattctgtctcaaaagtaaataaaattttaagagcacacctacccagataaggggtgagggcacccgtcacagccagactttcatgagcacacacacgcctgtgcacatgcaatcacacacccacgtgcacgcatgcagtggcacgcaccctcctgctcgtgtcccactgtgtcattgctccgggctgggaggtgtgcttcctgttccctgtcttccccgttagcctgtagcttcacaaggacagggactctgcctcatgacctgtcccccagagcctggcacacctgatgtctaaacacggtgtggacccaacaacactttctgtacaaacaaatgtaggaacctcaatgtaattttaatgacctcagaccagtgacaagggcagactgaccaggggctgtggggggatcccagagcaacctcgagggcgtcctggtgcttaccacctggaaactggtgaggtggtgggagaactcctggtggaccctagtggaagccttccagtaatttcttgaagctgagcgctcaggtgagtagggcgacatctggtggccggttgttgaaggtcattgcagagaggaaggaagccgaggaggggagcctgcagtgagggcgtcctggggttctccggttctcaccacccttgggccacgccgtctagtccacacctgaggagttggtcaggtagaaggggcggatgaccgtgcggaagccgttgaagtgccctgccgggcaggggaaggaggaggtgctcttcgagctgttggtgtccagggcactgggaatcgcagccttccagccctcgaaatcggtgacgtctgccacgaagagcccttcgcagagcatcagggctttgttttcgtaggcaatggtgcgatctgagccgccagacttggtgaggcccaggacagggagctcgtccgaggagcaggagaagccgtagttccagcagctctggatggtggggaggtagaccagggaccaggacaccctcttgtcctggaagaggaagctggggtgttgtggagtctggaaggactggtaggggtagtatctgtagtcagagggggcttggaagtaatcagaagaatatttgaccaaaggcccccgtctggactgatagaccagttgtgacttccgtgcactccaggaactgtctgtcacaaaggcactccaggtgggcgaggtgtaaatccggggcttgtaggtatcctcggtgaggttcaggcctttgtaccgggccagcaactggaagggcacagtgtggaattccagggcctgcagagtcttcttctggaacagggcctcgtggctccagtacagggacaggttgaactgcagctcaaagagctcctcagggagcatcatggggaagcggatcttctccaccaagccctccacctcctcatgggaggcacgctccccccagctccaggtgtccacggccttcagtagggccagctcgctgggcaccgccaggtcgctcctgggcagcagcagttggagcaggtctgtggggacactgggccaggcctcggcctgcgtcaaggcctcgaagttccaggccaggaactgtaggcagagcttctccagcagggcgtcccctgtggccactgcataggcatacaggtccaggggcatctggaacgaggggtcctgggggaggaggatggcaaagaggcttgcgcagtagccctgcagctgcctggccccataggcagaggccagcttgtggaagcacttgactgacgacagggtgatgtcaatccttcgggagtagaagtacctggggagaaagaaggagagcagatgccggccccacaggacagcaggggagccctgggcccaactgtccaacacagccacctgagtgcacacagtgtgggagtgagcatgcgtgtgtgtgcaactgcgtgagtgcatgtgtgactgcgtgtgtacatgtgcatgcatgagtatgtgcaggtgtgtgtgtggggggctgtgcttttgaagaggggaggaggacaaagcccctggcggccccagagcctgaggacgagacggctcacctgagaaggtccctgaccatgggcacacactcagcatccacactcatggtgacattgctgcccggctccttccacagggcctgggcctccaggttggcagtcaggatgaccgtgtggccacagaagcccagggcgtcctcgccctgcacattcacgctgatggacaggtcgcagccccgctggctgtcaaagatctggccaagggcctccgagagctccctggagaggtccagggtgtgggtgctcctggtttctaagaaggggcgggagggaagtgggctgcgttaggagccggggcactgccactctctggggtcagtgtcttcatctgaaagtgagggatttgtggctgcctcattcactctggaaggctcctgggaagacgagggacaagagagaccggaagtgtcggattcctggaccctgaggccccgccccttccagccctggggaacaagagcagctaggacctggccaagcctgtccaggcccccgctttaggccctctgctctgtgctgctcccccgactcaggcagcagctccgcatggagacttggtggtactgactccggagcccccactccccagccttggtcaccaatcaccactaacaccaaaaccactgcctgcttagatggcctgaaaagttagggtcctgtggcaaccccattttagaactccgggggtcctcgagcagcttcctgtcggggagaaggcctgcagaagtcatgggaggctcccggctcgggggtcagtgtggtgcaccctctccccttctttgagcccctctcaaagcctaactcaaaatgaaatcccataggtttttcttcgccacaaatatagtagttttgaagtaactgtgacctttcaaccaggtgggcttgccctgggcctcctaaaacctgagccaccgcaggacccccagctccctcccacctgcacgccttaccacagctctcctgccccaggagctttggccgtgcgcccatggccccgtgtgctccccgccgcctcccctggcccccgacagccccatggcgtctcctgggcttcccccactgtgagtccaggctcagctccagccacttgtccatcccatgtgggcacaggggctccctgggattcgacccgtcctgccttaggggcctccaactcctggcaaagggcagtgggcaggaaatgcccaggttgtcacgtgcaagcccaggaagagccacctcggcatgaaagaaaaacaagaaactcagatccagaggctccaacctgcagagcagcctgggttccctccaaactgggccaggttgggggaagcaggctgaggctgcgagtagccgggactccctccgccaggacgggcttgagcctgtcgcgtgctgtgaagtgtatttctgagcggacgctggcatttcaggtcaggctggagccaggtgtcatgctcactgaaactgtggctcactgccccacactcgggttctgcatggagacttggtggttctgggtgtttctccagaaggggctggggaggagtctgggactgtgggactgggagctggtgggctcttgggacgtctgggcctctccatgcggagtgggcaggcggtagtggaaggaacctttgtgtgcttcatgtgcgtgggggggtggtgctgggaggggcaggggccacgggaccccagggcacactggggcctccgcagggaggtgcgcccccgctcaccattggtgcagaccacaccagcgtctctctcgtgcctgcagttgctcttcagccagcccagggacttgcagtcggccagtgaggcctcggttcccgtgcactggacctcatccagcatgatggggcctgatcctgtggacacagcagatggcagggctgggggcgtgacgactgcacccaggagtcccacagcgcgactcagccctttgttctccgccccggccgtgtgggtccatctgcttacaggtccttcaccagcgaaccacggaggatattccagcatgggctggatttgtgattgcaatgtcaggccataaacttagccttcatgcttataaagcttaccggctgcttcagcgacatcacattcatgtatagtaattgtgtgactatccctgcaacatcagtttcacatactgtaattgtgtgactatccctgcaacatcaggttcacatactgtaattgtgtgactatccctgcaacatcaggttcacatattgtaattgtgtgactatccctgcaacatcaggttcacatactgtaattgtgtgactatccctgctgctaaatagtttatggattgtttcttttttttccagaatcgcaactgctgtgtcagtggaaatcttcctgcagacttttcttttgaggagaaattgtttcaatgggataaactccctggagtggagtttctgggccggagggaacgagcccagccgagctcttgaacctgcccaagcacccgccaccatcactggccaagtgtgggtggagcagtcccatcagaacttgatccgcaggccttcagcaccattgaaaatgtttgctcataggccgggtgtggtaatcccagcactttgggaggctgaggcgggcggatcacttgacaccggaagtttaaaaaccagcctggccaacatggtgaaactctgtctctactaaaaaatacaaaaatcagccgggcatggtggcaggtacctgtaatcccagctactcagaaggctgagacaggagaatcacttgaactcaggaggcggaggttgcagtgagccgagattgtgccactgcactccagcctgggcaacagagcgagactccatctcaaaaaaaaaaaaaaaaaaaaaaaaaaaaaaaagtgtttgctcttgctaaattaataggaatccaatttgcatgtctttgaaacctgactgtttcgtcttaggggatttgcccctcctgggagctggctgtgctgtgggtctcagcctcagtggaaggggacagcaggccctaccttgcccgaaggcagctctgcccagagcctgggtggcgttctcgaagcccagggcccggcagacgacgctggcatcagtcaggtcccacaggttgtcacacacagtgccccactggcctctgtagaagatctccacgcggccctggttggtggcgcccccatcggccagccgcatgtcaccatcgttcacgcctgcaggcagagaccagcgagggcgaggctggggcctgcagcacccaccgcccacacctccaggccccatatgctgtcctgggtctcccctgctgagcttgtatttcagggcttcaaggtcccctggcctctccatgaggggcacctccatgagggaggagtggaagatacatacagccccccctaccccgcaaggaggccaaactcgcctttccttgttttaggggtctcagcccttcactccatagacagaacaggggcagagaagccctgagttctccagcactgggagtggaggtggcaagaccctgagggaaggataggaggggaacggaggccccgtgctgacccgccctgcagagggtgtctgcagtttgggggtgctggcctatgggggcagcaggcctagggacccctgggagcacaggcagaatgtttccagggcagataatgggattcccccgccccacatgtccttctgggactcagtccaccaacactccagcccctacaggagctgacagagccgggcaggagctgggtgcctgaatccagtcgggggtacatctggcttccatggggcccccaggatgagcatgagcttccaggggctcacagtgtaaagaatgtgaggaaaagcagccaggaccctctggaagactgacctgcgtccaaggccactgacctcacaacggcccctgtgactgctggtttgatcagcccctctggttccctctggacggaatggaggattccctagtgtcctctctataacctgcatctcacctgaacccaggtgagcccccgggaacctccaagtcatcatcactggggatacctggtgcttcaagcaggagagaagatctggctaaccgctgggccccgggccccaggcagaatatctccttgaagctctgagcagccccagggtgcaccagccttccacacttctgcttttggtatttcccaggggctcagctcaccttgggttcctgcaaccagcagccacacccagaagagcctcggaggggtcatggccgtgcctggatgcccagatcctgcagcagacagaagcggaggggtgaggcacgggagccagatggcccgaggccccagggactggcctgcccattcacccttcagcccaacctgggctgtgtggcaggcggggtccctctcttgcagagcccactatgatcccagtaagtgtgacgtgtgctgtggatgcccccgcgggggcccctcacctggtctgcagtgtggtcctggaaggatgtgtaacacttggctagatgaagcgtgggctgggggcaccccctggcagtaagggcagcaagaattggtgactagaggcaagtgagctcatctcaaaaaaccaggccccgggcaaggctgccacacgggcatgggcggggagatggaggaggccacaggcgtgggcccaggtcgggaggccgggtgagcctggttaagatctcggccttaagcttcaggcaacagacccctgcagggactgtcccagagggtctcagcaggcagagacgaggctgcagcctggagagtggatgggaggggactcgtcaggagagggcacagaatccgggcgaggggtgacagagataagtggcagggagatatatcggggctccgtggtgttccgatggggaagatagatgaaaagggtcagggctgcagcccagggtgggccaggctgggggaagaacagggaggaaatgctgaagtatccccaagacactgacactcaggccaggactggggaggtccgggtctccaccttctggcctggtgttcttgcctccgtgtaatttccacgcttttgtcttcgtctgcctccctcccccacaccctgccaatggagagacagttatggtttctctggctcggtaagaatcctgtgatacctgacactgtcccctcagttcagcaagcctggggcaggcctctgggtggcactgctgtgggcaccggctgggagtctgggcctggtgaccttgaggctgcttggagggggcctggtggacggctgcaatggcatccccagagcttgtcggaaatgcagtcatggctggccttgccctagcccctctgcatgggagtctgcatgaacaagcgccctgggagctgggtgcactggctggtgagcagctttgctctgggactcgtgctcgctggcactgtgcagccaccccttgtcggggctccccgggcaccactggaggccttaccgtgaccctgagaaccaccttagttacacctcaccttacaagtgaatgagctgacacccagagaggcaaatgggctccacatccacagtcagtgagccacaggcagggggtctgctcgggggagcccacctctcctccctgtgtcaatgtcagtagatggctaaaggggccagggtgtgaccgcctgtcctgtgtgctggggactgtgctggttttagcactgaagtttccctgtgtcctgggaaacccctcagtcccaggcacgccggtatgggtggacgccctctccacttctgcccccagccacttcactctgctgcagccactaggtttgtccgtcctgggagagtaactcagggccttggaaaaatggccaactggccaggcgcgatggctcacgcctgtaatcccagaactttgggaggctggggcaggtggatcacttgaggtcaggagttcaagaccagcctggccaacatggtgaaaccccggctctactaaaaatacaaaataataataataataagctgggcatggtggtgtgcacctgtagtcccagctactcaggaggctgaggcaacagaattgcttgaatccggcaggcagagattgtagtgagccgctgcactccagcctgggtgacagagcaagactctgtctcaaaaaaaaaaggggggggggcaacgaagcacctggcaggtggcgtcgctgccctttgtgtggcagcggctatttttgcctgattccttcatacagttgagacccggctgcctgtgttggccccttcgtgcaaatcagaaaaaaaggtgctcttccttggagtgggtgcaggcctaggccaaatgcacaggtctgagagagggccaagctgaattctaacccacttgccctttggctggtatccttgtgcagtgagtaatctgcccaactgtacacagaggccctgtgggcctgggagcagcaatgattgttgctggactcaggagccctggatccccagctccaggcctatgtgcaaacagggaggcatgacccccacttgcctgtgtagagagaggggtgccctggccgggcgcggtggctcacacctgtaatccctacactttgggaggccgaggcgggtggatcaccagaggtcaggagtttgagaccagcctggccaagatggcgaaaccctgtctctactaaaaatacaaaaattagctgggcgtggtggcacgcgcctgtaatcccagctacttgggaggccgaggcaggagaatcgtttgaacccaggaggcagaggctgcagtgagcggacattgcatcactgtactccagcctgggtgacagagtgagaccctgtctcaaaaaaaataaaaataaaaaagagagagagactgagaggggtgcccacctgagagctagaggcaggagcttacctggctgcggtagctgcaacggccgtgtggagcctcctcgcttccagccacaggatccctctgcagactggtcctttgacccagaagcctctcccagtatggagcgtggtcaggctgatcccaggaaatgcttcagaaaagagtctactttcgatttccagaaaccacctgacatagatgtcttccgggattggctgctgctgatactccccagggcccctctcttttgtctcagctctgcctgtggctatcagtgccaggctggcagaggcccaaggtgggagtctggctggagcaaggcctgcaagaggactaacagccacactcagttggaaaggccgccaggctggtcaggggctggcgtttggtggacgggaggggaagaagcagaggctctgggcccagacagtctgcacctggtggtgtggctgtggactctgacagagcgctccgagtcttttcctgggtctagcacgttgctggctgggtgaacaccacacagggggctgcttatgtgcaaatccaccctctctgtgctcttggcatgctgaccacacagagggcctgtgccccacaaggttgcatggcactgtcccctgtccccaggggagggaggcactgagaaccaggtatgcagctggccagtggaggagctggaccctgctccaacacctgaccccagagcctgtgctcgccactgctggacctgtggccactctcctactgtctccccctcagcggggcgggggacagagcctctctgggtgacataatggctctgtccagctcatacccattccctttcctcccactgaaagccggcacctcaactgtcccttggggagcaccccctcccattcccggctgtgtggttcccagagggcccccagctcttggccttcaaccacccaaggcctggctgtctgagccctgcgggggccccgggccacactgctggtttcagggtggggctgtgagcccagccagccggtgagagccagcttctgactgagaggatgtgggcccaggctgctggggccggtggggcagagcagagggaagcaggcatcctccggcctgagctcctgggtccagctggcctaatccatggtcaaggctgggcttcaccgctcagtgaggcaatcagcagccgctcttgtttctgtcacttgcaccccatggttctggatgagccttgggatgtgcccaggcctctgaccagtggttctcagcctgggctggacagaagaatcatcagggagttttacaaactcctaatgcctagacccaggaagtcaccatctctgggagtaggggacaggcaggggcatttaaaagcccccaggcagtcccactgggtggaaggccctggttccctggcagcttagagtccgagacagccagcccagaggtcagacattcaatgactatttccttcaaggtgtgaggttttaggcagctgcacggtttgcctaatcccctccagaggaactgtgaagatccaggggcaggtgcagctggaaatagaactggctgtggggagtttaaaaaaatctcatctggattaagggcctgagtgcacagaaaccccagcatcatcccttctcagcagtgctaatgacttctgcccaagtggccagggaaggacaggagtgcagaggacgggagggcatctctgggaagtgctgggaaaggttttaaaactcaggtgccgaatctttagccccagagtccgggaaagtcctaagccatccaggcaggtaaaatggaaaacccagaggcctcctcgtggaatcggagcaccaacatctgctcccctggggctcgcaaggcctttccggtgtgcgatgaccatggggtggagggaagcgctgacaggggacaggcaggggaaggggcagcggctcggctctgagaagacagctgggtgaaagcctcagattcgtgtggacagaactgctgtcatcaggaagccgctcccaagacatggtagggaaagtgcggggcatttcagagatgagaatggttaactggcctgtaaggtcatcttttgtgcctctaccccaaacctctccgcaaattgaggaacgctccctataatagctaatatggatttcgccaggcattactataagccttgccacaaatgaatgcatttaatacttccagccatgatgggaagcagctgctcttatattccctgttacagatgagaaaacagaggctcagtgaggcgacgtaatcggctaaagttgtgcagctggtaggggaagaactggggtttcaaacccatcctttccttctttttaaaaattggctttcttggcatataatttacgtgcaaagttttggcaaatgtgtagcgatggtatcatgacaacaatcattacctagggcgtttcaatcacccctaagaattctcttatgcccctctgcagccacccctccccccagccccttcccagcaaccacctctcagcttctgccactgctggttgcctttcctagaattccctctattttgtcttcttttttaagacacagtctccctccattgcccaggctggagtgcagtggaacaatctcggctcactgcaatctctgcctctcaggtccaagtgattctcctgcctcggcctcccgagtagctgggattacaggtgcgcccaccaccacgcccagctaatttttgtatttttagtagagaaggggtttctccacattggccaggctggcctcgaacccctgaactcaggtgatccgcctgcctctgcctcccaaagtgctgggattacaggcatgaggcaccactcctggaccctagaattccctctaaatggaatcatacagtatttaatattttgcatgtggcttcttttacttaccacagtgcttctgagatccatccatgctatctcaacaatcagtaactggctcctggttttgctgggtggcggcccactgtatggacagaacaccactgttaatacatgtttgcactgatggacatttgggtcattccatcttccactattatgcataaagctgctggaaacatttggatacaagtctttgtgtgaaaataagtatttattttgtgtaaatacctaggagcaggattactgggtcatatggtagatatatgtttacctttttaagaaactacccagcacttcaggaggctgaggtgggtagatcacgaggtcaggagttcaagaccagcctggtcaagatggtgaaaccccgtgtctacaaaaaaatacaaaaattagccaaacatggtggtaggcgcctgtaatcccagctattcgggaggctgaggcaggagaatcgcttgaacccaggaggcagaggttgcagtgagccgagatcacaccacggtactccagcctgggcaacagagcgagatgccgtctcaaaaaaaaaaaaaagaaaagaaactgttttccaaagttgctgaaacattttgcattcttgctagtaatttcttcatgttccagtggtttaaatcgtcaccaatacttggtattgtcagtctttaaatttcatccattctggtgggcatgtagtgaagtttcattgtggttataatgacgaatgataggccgggtgctgtggctcacgcctgtaatcccagcactttgggaagctgaggtgggcagatcacctgaggtcaggagtttgagactagcctgatcaacatggagaaaccccatctcaactaaaaaatacaaaaaaattagccgggcgtggtggcgcatgcctgtaatcccagctacttggcaggctgaggcaggagaatcactagaacctggaaggcagaggttgcagtgagccgagatcgtgccattgcactccagcctgggcaacaagagtgaaactccgtctcaaaaaaacagaaaaaaaaaaaaaagacgaatgatgttgagcatctttatgcttctctgtcattcacacatcctctttggcaaagcgtctgttcaaatcttatgcacgtttgaaaactggcttgtttgttgtgtaagttctttatatatattctgttcctgtagcagatatatgatttgcacttttatttttaatgaaaagcttgcttttcattatctttttttttttttcttttttttgagacagagtctcgttctgtcgcccaggctggagtgcagtggtgcgatctcggctcattgcaagctccgcctcccgggttcaagccattctcttgcctcagcctcccgagtagctgggactacaggcgcccgccaccatgccggctaattttttgtatttttttaagtagagacggggtttcaccatgttggccaggatgttctcgatctcttgacctcgtgatccacccacctccgccccacaaagtgctgggattataggcgtgagccaccacgcctggtgagcagagggtgactgaatagaatgggaggcaggatggccctaatcagtcccagcttgacttttccctttagctggtgattttggggcccaagatattttcctttcacaactctgttctctgtgggaacaaatgacttcaactttaaggcaggagaatggtgtgcacccggcaggcagaggttgcagtgagccgagattgcgccactgcactccagccagggcgacagagagagactccgtcaaaagaaaaaaaaaagaatgtatccatttgtctctcatctacctgtgacctggaagccccctccccacttggagttgtcctgcctttccagactgaaccaatgttcattttacatgtgttgattgatgtcttatatctccctaaaatgtataaaaccaagctgtgccctgaccaccttgggcacacactgccaggccctcctgaggctgtgtcaggggcgcccacgtcctcaaccttggcaaaataaactctaaattaactgagcccggctgggcgcggtggctcacgcctgtaatcccagcactttgggagggtgaggagggcagatcacttgaggtcaggagttcaagacccgcctggccaacatggtgaaaccccatcaataccgaaaatataaaaaatgagctgggtgtggtggtgcacacctgtaatcccagctactcggaaggctgaggcaggaaaatcacttaaacctgggaggtagaggttgcagtgagccaagatcacaccactgcactacagcctgtcaggagagagattctgtcccaaataaataaataaataaataaaataaagtaaattaactgaggcctgtctcaaattttcagggttcacagggttgtcccagcaccatggtgggaagacagtcttttgtatttcaggtgaattaccctggctcttttgtcaaaagtcaatgggccacatccataagggtctatttctggaccctattctgtctcacttgtcggtgtctgtttttcttatggcaatactacactgttttgattacttacagcattatattaagtcttgaagccagatagtataagtccttcaactttgcttttctttttcaaaatcaagtctgtagacccatgaagacgtatactgttttgttcttttgagtctctgatttctttcatcagtgttttgtagtttcaggatgtagatgtcacacatcttttgttagacttatacgtaactatttcccgatttttggtgctactgtaattgacaatgtttaaaaattttacaatttctagttgttcactgcagttataataaagttaaattttgtatgtggaattaatatattaatatgttaaatattaatgtattaaatttaacatattaatatatattaaatattaatatattaaatttagtatgtgtagtttcgtggtttttttgagacagagtctcgctctgttacccaggctggagtatagtcgtacaaatactgctaactgcagccccaatctcctgggctcaagtgatcctcccacttcagcctcccatgtagctgggaccacaggcaggcgtgaccacatccagctaatctttacatttttttgtagagacagggtcttgctatgttgctcaggctggtcttgaactcctgggcttaagtgattctcttgcctgagcctcccaaagtgctgggattactaaaggcgtgagccaccatgcctagcctcgtagttattttttgaagatttcttaggcttgtctagctagtcaaagcttgtcactggcgaataaagatagttctattccttcttttcaaatctgaataacttcctttttttttcttttgcaccaataggatgaggaataaaagtgatgagagcaatgtcagtttcctgggtttggtaaatgtactgtgcttaggtaatcagtacactggagggagccacatgaatgctgcacagaaacacgactgctggccccgcttatctgcagtttcacttactgcagtttcagttacccacggtcaactgaggtctgaaaatattaaatggaagattccagaaataattcataagttttaaattgcatactgttcctagtgggatgaaatattgtgtcatcctgctctttcccttcttcatcacaagggcgagtacagtacactaagatatttagagagagaccacatgcacataactcttattttagactattgttctaattgttctatttactatgttactgttaatctcttactgtgcctaatttatgaattaagctttatcgcaggtatgaatgtagaacagtaaattccacattatctatggtttcaggcatccactgcgggtcttggaatgtatcccccacagaagggggatatgaaccaaaaagtatctgagactgttctcaaccagttaattttgccaaggtcaaggataaggccagggaggcaaaacaaaacgtgacaaaacacggaatcgctgaaacagtctgtggtctgtgcctttctccaaaggtgactttgagggcttccatatttaaaggggaaaagcaggctggagggggaagtgggagggtccggtcctagtgctgccgccacgggttgcaagagaagagaagcaggcaggggaacagtcaatcgtgtattcatctggtgctcagtaaattggcacttcacataagataaggtgagcacagtagctacctgccgaggtctttagcctttcctctgtcgctctctgcttaggaacaagaggaaaggcagctgcttgcatgactcagctctcagcttcctgttttttcctattggaagggtgcattgcggtttttattttcctttcataggacctactgtatttttgcaacttctgtgtggttcaaaattttatttcaaaggaaaaaatggtggggaagaaagtggtgaaagcagacactcttgcgttgttcctcagggggaaggcattcagtgtctgaccgtgaagtaggagcttagctgtggacttctcaccggagcccttcatcgggttaaggatgttccctaacgggttttttggctttttgtttagaattggattgggtgaatggctgttagattctgtcaaatgctttttctctatcttttgagattatcatgcttttccccctttttagtcttttttttttttttttttttttttgagatggagtctcgctctgtcgcccaggctggagagcaatgggatgatgtcggttcactgcaacctccgcctctcaggttcaagcgattctcctgcctcagcctcccaagtagctgggactataggtgcgccccaccacccccagctaatttttcgtgtttttagtagagacggggtttcaccatgttggccaggctggtctcgaactcctgacctcaaatgcccacctcagcctcccaaagtgctgggattacaggcatgagccaccacaccctgcccctttttagtcttcatatgaatttcattgattgatttcagaatactgaactaaccctgtattcctagaataaaccacacctatcgtgaagtattcttgtcagagacgtttgaaccagagccactccatcttgaaccaggtctgggtaaattacggctgagacctgctgggctgcattccc
